(19) United States
(12) Patent Application Publication
(10) Pub. No.: US 2022/0348941 A1
(43) Pub. Date: Nov. 3, 2022

(54) GENETICALLY MODIFIED RECOMBINANT CELL LINES

(71) Applicant: Fraunhofer-Gesellschaft zur Förderung der angewandten Forschung e.V., Munchen (DE)

(72) Inventors: Gundula Noll, Münster (DE); Dirk Prüfer, Münster (DE); Julia Kronenberg, Osnabrück (DE); Philip Känel, Havixbeck (DE)

(21) Appl. No.: 17/726,324

(22) Filed: Apr. 21, 2022

(30) Foreign Application Priority Data
Apr. 22, 2021 (EP) 21169999.6

(51) Int. Cl. C12N 15/67; C12P 21/00

(52) U.S. Cl. CPC C12N 15/67; C12P 21/005

(57) ABSTRACT

Glycoproteins that are transgenically produced in mammalian cells exhibit non-human glycan structures. As in humans, this can possibly lead to immune responses, the drug manufacturing potential of these drugs is limited. On the other hand, recombinant protein production in human cells is inefficient due to the cells' poor protein yields, proliferation potential and cellular density. The present application solves these issues by providing a recombinant vertebrate cell that is comprising a non-vertebrate and/or artificial phosphatidylethanolamine-binding protein (PEBP). Compared to a parent cell line, the recombinant cells of the invention exhibit improved cell growth, protein yield and excellent compatibility with other established protein production methods. Furthermore, methods, for producing a cell line with improved vitality, protein expression and cell growth characteristics by introducing a non-vertebrate and/or artificial PEBP is given. Moreover, both a nucleic acid construct that is suitable for regulating recombinant protein expression in a cell by coding for such a PEBP and a recombinant cell comprising such a nucleic acid construct is provided. Lastly, a method for the recombinant expression of a target protein by culturing such a recombinant vertebrate cell of the invention is given, wherein the cell is also comprising an expression construct encoding the target protein.

### FIELD OF THE INVENTION

[0001] Glycoproteins that are transgenically produced in mammalian cells exhibit non-human glycan structures. As in humans, this can possibly lead to immune responses, the drug manufacturing potential of these drugs is limited. On the other hand, recombinant protein production in human cells is inefficient due to the cells' poor protein yields, proliferation potential and cellular density. The present application solves these issues by providing a recombinant vertebrate cell that is comprising a non-vertebrate and/or artificial phosphatidylethanolamine-binding protein (PEBP). Compared to a parent cell line, the recombinant cells of the invention exhibit improved cell growth, protein yield and excellent compatibility with other established protein production methods. Furthermore, methods, for producing a cell line with improved vitality, protein expression and cell growth characteristics by introducing a non-vertebrate and/or artificial PEBP is given. Moreover, both a nucleic acid construct that is suitable for regulating recombinant protein expression in a cell by coding for such a PEBP and a recombinant cell comprising such a nucleic acid construct is provided. Lastly, a method for the recombinant expression of a target protein by culturing such a recombinant vertebrate cell of the invention is given, wherein the cell is also comprising an expression construct encoding the target protein.

### DESCRIPTION

[0002] Today, the majority of biopharmaceuticals are produced in recombinant organisms. Bacterial expression systems, such as E. choli, are used to produce simple non-glycosylated monoclonal antibodies, hormones, cytokines and enzymes. Mammalian cells on the other hand are the predominant system for the production of recombinant proteins that display complex posttranslational modification. Although they are higher cost, they achieve superior protein activity, stability, and immunogenicity compared to non-mammalian bacteria and yeast hosts.

[0003] The production of biopharmaceutical proteins in mammalian cells by transient expression or stable transformation requires robust and viable cells. As of date, the most used mammalian expression systems are chinese hamster ovary (CHO), Sp2/O and or murine myeloma (NSO) cell lines. The benefits of these cells include a high recombinant protein yield, ease of transfection, and ability to grow at high densities in large-scale bioreactors. However, these mammalian cells produce glycoproteins with non-human glycan structures such as galactose-α1,3-galactose or N-glycolylneuraminic acid. These structures potentially trigger immunogenic responses and affect their biological activity, protein stability and clearance rate, which necessitates extensive and costly downstream processing. For these reasons, human cell lines are increasingly used for recombinant protein production. (Chin et al., Sci Rep. 9, 16768, 2019, doi: 10.1038/s41598-019-53391-z)

[0004] The most important human cell lines for this use are PERC.6, HEK-293 and HT-1080 cells. In comparison to other mammalian cells, human cells however do not yet give the same performance regarding growth rate, cellular density and protein production rate. To improve these performance indicators, commonly used strategies include isolation and clonal expansion of promising cell lines and the introduction of viral nucleic acids. HEK-293 in particular exhibits several commercially used clonal isolates that allow for improved culturing, transfection and protein production efficiencies such as HEK-293H. Other modified HEK-293 cells include the HEK293-T and HEK-293E cell lines. HEK293-T expresses the simian virus 40 large T antigen and are capable of expressing high titers of viral gene vectors for use in gene therapy or for viral vaccines. HEK-293-E cell lines constitutively express the Epstein-Barr virus EBNA-1 gene that is controlled by the cytomegalovirus promoter and demonstrate a greater growth rate and cell density relative to parental HEK293 cells. (Dumont et al., Crit Rev Biotechnol. 36(6), 1110, 2016, doi: 10.3109/07388551.2015.1084266)

[0005] Nevertheless, the possibilities of these optimizations are limited by a narrow number of available cell culture conditions and vector combinations. Efforts to improve the efficiency of a protein production are usually based on tweaking either one of these parameters and rely on chance rather than design. Cellular engineering approaches to improve cellular protein production rely on the manipulation of cell cycle and survival regulators. However, these methods are not suitable to increase single beneficial cell properties due to interlinked signalling pathways. For example, the expression of apoptosis-inhibiting proteins can also lead to decrease in the production of target proteins.

[0006] Phosphatidylethanolamine binding proteins are a superfamily of proteins with hundreds of members, only four of which (PEBP1-4) have been documented in mammalian cells. Their numerous biological functions include the biogenesis, fluidity, and formation of functional domains in membranes, stimulation of acetylcholine secretion during neuronal development, serine protease inhibition in neuronal tissue, spermatogenesis or sperm maturation. Notably, PEBP1 and PEBP4 are also known to influence cell proliferation, differentiation and apoptosis, by acting as regulators on the PI3K/AKT/mTOR and MAPK/ERK pathways. As such, they are promising targets for host cell engineering. (He et al., Biochim Biophys Acta. 1863(7 Pt A), 1682, 2016, doi: 10.1016/j.bbamcr.2016.03.022)

[0007] Influencing the productivity of human cells by directly altering PEBP1 (also known as RKIP) and PEBP4 is difficult to implement for several reasons: Human PEBPs are intricately linked to phosphorylation-dependent signaling hubs and their manipulation can increase off-target effects such as the induction of apoptosis. The function of human and other mammalian PEBPs furthermore requires posttranslational modification by other signaling pathways. In particular, mammalian PEPBs exhibit an elongated carboxyl-terminus. This terminus is determining their binding affinity to other molecules and is subject to conformational changes by co-regulators. Plant based PEBPs on the other hand lack this feature.

[0008] Thus, it is an object of the invention to considerably improve the performance of mammalian and human cells in recombinant protein production. The toolbox of cellular engineering needs to be expanded with functional proteins that can preferably be targeted by orthogonal signal pathways. Hence, the invention seeks to provide recombinantly altered cell lines with various improved characteristics compared to their origin, in which characteristics may range from cellular protein expression, cell viability, cell vitality, cell growth and/or—proliferation, cell metabolic activity, cell signaling capacity, and many more.

### BRIEF DESCRIPTION OF THE INVENTION

[0009] The present invention addresses this problem, by providing a recombinant vertebrate cell, comprising of a nucleic acid sequence that is encoding for a non-vertebrate and/or artificial phosphatidylethanolamine-binding protein (PEBP) and/or that is comprising a protein consisting of an amino acid sequence of the non-vertebrate and/or artificial phosphatidylethanolamine-binding protein (PEBP). Furthermore, the invention pertaining to a method for producing a cell line with improved characteristics selected from vitality, protein expression and cell growth. This increased vitality allows for a fast gain of cellular mass and an easy upscaling of protein production. Furthermore, the introduction of non-vertebrate and/or artificial PEBPs gives an additional means to influence the productivity of recombinant cells, that can be manipulated independently from established methods such as the introduction of viral expression systems or optimization of culture conditions.

[0010] Generally, and by way of brief description, the main aspects of the present invention can be described as follows:

[0011] a first aspect, the invention pertains a recombinant vertebrate cell, comprising (i) a nucleic acid sequence encoding for a non-vertebrate and/or artificial phosphatidylethanolamine-binding protein (PEBP) and/or (ii) a protein consisting of an amino acid sequence of the non-vertebrate and/or artificial phosphatidylethanolamine-binding protein (PEBP).

[0012] In a second aspect, the invention pertains a method producing a cell line with improved characteristics selected from vitality, protein expression and cell growth, comprising the steps of providing a candidate vertebrate cell of a selected vertebrate species, introducing into the vertebrate cell a non-vertebrate and/or artificial phosphatidylethanolamine-binding protein (PEBP), and culturing the cell to obtain the cell line with improved characteristic.

[0013] In a third aspect, the invention pertains to an isolated nucleic acid construct suitable for recombinant expression in a vertebrate cell or cell line, comprising a coding element operatively linked with one or more expression elements which is suitable for regulating protein expression in the vertebrate cell, wherein the coding element comprises a nucleic acid sequence encoding a non-vertebrate and/or artificial phosphatidylethanolamine-binding protein (PEBP).

[0014] In a fourth aspect, the invention pertains to a recombinant vertebrate cell comprising the nucleic acid construct the previous aspect.

[0015] In a fifth aspect, the invention pertains to a method for recombinant expression of a target protein, comprising a step of culturing under suitable conditions a recombinant vertebrate cell of any one of the preceding claims, wherein the recombinant vertebrate cell further comprises an expression construct encoding the target protein.

### DETAILED DESCRIPTION OF THE INVENTION

[0016] In the following, the elements of the invention will be described. These elements are listed with specific embodiments, however, it should be understood that they may be combined in any manner and in any number to create additional embodiments. The variously described examples and preferred embodiments should not be construed to limit the present invention to only the explicitly described embodiments. This description should be understood to support and encompass embodiments which combine two or more of the explicitly described embodiments or which combine the one or more of the explicitly described embodiments with any number of the disclosed and/or preferred elements. Furthermore, any permutations and combinations of all described elements in this application should be considered disclosed by the description of the present application unless the context indicates otherwise.

[0017] In the first aspect, the invention pertains to a recombinant vertebrate cell, comprising (i) a nucleic acid sequence encoding for a non-vertebrate and/or artificial phosphatidylethanolamine-binding protein (PEBP) and/or (ii) a protein consisting of an amino acid sequence of the non-vertebrate and/or artificial phosphatidylethanolamine-binding protein (PEBP).

[0018] As used herein the term “recombinant cell” or “modified cell” refer to a cell that has been manipulated in vitro, e.g., using recombinant nucleic acid techniques, to introduce nucleic acid into the cell and/or to modify cellular nucleic acids. Examples of recombinant cells includes prokaryotic or eukaryotic cells carrying exogenous plasmids, expression vectors and the like, and/or cells which include modifications to their cellular nucleic acid (e.g., substitutions, mutations, insertions, deletions, etc., into the cellular genome). An exemplary recombinant cell is one which has been manipulated in vitro to express an exogenous protein, such as a phosphatidylethanolamine-binding protein. The term “cell line,” as used herein, refers to individual cells, harvested cells, and cultures containing the cells, so long as they are derived from cells of the cell line referred to. A cell line is said to be “continuous,” “immortal,” or “stable” if the line remains viable over a prolonged time. A “recombinant cell line” in context of the invention shall be understood as a combination of the two definitions provided herein.

[0019] The terms “vertebrate” refers to the class of species that comprise all animals with the subphylum vertebrate. The term “non-vertebrate” shall refer to any animal or plant that does not fall under the definition of a “vertebrate”. Hence a non-vertebrate can be a plant, a fungus, prokaryote, or an animal invertebrate, such as worms or insects.

[0020] In the context of the invention, phosphatidylethanolamine binding protein (PEBP) refers to any protein of the phosphatidylethanolamine-binding protein family. Proteins of this family are known to bind ATP, opioids and phosphatidylethanolamine. These proteins have been identified in numerous tissues in a wide variety of organisms, including bacteria, yeast, nematodes, plants, drosophila and mammals. In all organisms PEBPs appear to regulate important mechanisms that govern cell cycle, proliferation, differentiation and motility. In plants, the PEBP genes have been shown to be involved in various physiological processes, such as seed germination, floral transition, and seasonal growth adaptation. There, the PEBP gene family can be divided into three subfamilies: MFT, FT, TFL1. The MFT subfamily exists in both basal land plants, and seed plants (gymnosperms and angiosperms), while the FT and TFL1 subfamilies are exclusively found in flowering plants, including early diverging and eudicot lineages. The FT and TFL1 genes are highly conserved in sequence, but their functions may be antagonistic: FT mostly promotes flowering, while TFL1 represses it. In humans, two PEBS are known: PEBP1, and PEBP4.

[0021] An artificial PEBP shall be understood to refer to a PEBP whose sequence was altered by human intervention and therefore does not occur in nature in any organism.

[0022] In a preferred embodiment of the invention the non-vertebrate and/or artificial PEBP is a protein that is heterologous to the species of the vertebrate cell, and/or wherein the nucleic acid sequence is for a heterologous expression of the non-vertebrate and/or artificial PEBP. The term “heterologous protein expression”, as used herein, shall refer to the protein expression of a gene, a nucleic acid or a cDNA, which is foreign to the cell in which the expression occurs (“host cell”, or “expression system”). Heterologous (meaning ‘derived from a different organism’) refers to the fact that the transferred protein was initially cloned from or derived from a different cell type or a different species, and coding genetic material (e.g., “cDNA”) was obtained which is then transferred to the host cell. The genetic material that is transferred typically must be within a format that encourages the recipient cell to express the cDNA as a protein (i.e., it is part of an expression vector). Methods for transferring foreign genetic material into a recipient cell include transfection and transduction. The choice of recipient vertebrate cell type is often based on an experimental need to examine the protein's function in detail, and the most prevalent recipients, known as heterologous expression systems, are chosen, among others, for (i) ease of transfer DNA, (ii) capability of creating the protein in a pharmaceutically efficacious form, function, (iii) protein yield, and the like. Within the specific scope of the present invention, the term “heterologous” in context of the expression of protein within a cell means that said expressed protein is not a protein naturally expressed by said vertebrate cell originally, or by the organism the respective cell derived from.

[0023] The term “recombinant protein expression” largely overlaps with the term “heterologous protein expression”. The term “recombinant” alludes to the fact that “new” (coding) genetic material has been introduced into an expression system, e.g., a cell. Such process results in the formation of a recombinant nucleic acid (e.g., a recombinant DNA), and the host is thus called a recombinant host, e.g., a recombinant cell. One idea behind this process is to produce a protein from one organism (e.g., a human protein) in another organism, e.g., in a cell-based protein expression system, like a CHO cell.

[0024] In a preferred variant of this embodiment, the non-vertebrate or artificial PEBPs comprise an amino acid sequence having at least 90%, preferably 95%, more preferably 98%, 99% or 100% sequence identity to the sequences of shown in SEQ ID Nos: 1-622 (plant PEBPs), SEQ ID Nos: 820-928 (insect PEBPs), SEQ ID Nos: 929-1127 (prokaryote PEBPs) and SEQ ID Nos: 1128-1270 (fungi PEBPs).

[0025] In another preferred embodiment of the invention the non-vertebrate and/or artificial PEBP is a plant or insect PEBP. In the context of the invention, it is particularly preferred to select the origin of the PEBPs that is transferred to vertebrate is a sequence of a PEBP derived from an insect or a plant—such insect PEBPs comprise an amino acid sequences that is shown in any one of SEQ ID Nos: 820-928, or a sequence that is at least 90%, preferably 95%, more preferably 98%, 99% or 100% identical thereto. Preferably, the sequences are PEBP sequences from a drosophila subspecies (SEQ ID NO: 820-827&859-887). In yet another preferred variant of this embodiment, the sequences are comprised of at least one of the PEBP sequences of Drosophila melanogaster (SEQ ID NO: 820-827). Most preferably, the non-vertebrate PEBP of the invention comprises an amino acid sequence that is at least 90%, preferably 95%, more preferably 98%, 99% or 100% identical to the sequence of CG7054 (SEQ ID NO: 822) or CG10298 (SEQ ID NO: 820) or CG18594 (SEQ ID NO: 821).

[0026] In the context of the invention, if a plant PEBP is selected as a non-vertebrate PEBP, such PEBP is selected from one of the amino acid sequences shown in SEQ ID Nos: 1-622. These sequences do not comprise the most C terminal alpha helix of human PEPB1 (SEQ ID NO: 623). In a preferred embodiment of the invention, the non-vertebrate and/or artificial PEBP consists of an amino acid sequence that when aligned with the sequence of SEQ ID NO: 623 (human PEBP1) does not comprise the most C terminal alpha helix. Preferably, these plant PEBP sequences are comprised of amino acid sequences of the FT-like protein family (SEQ ID NO: 1-222). More preferably, these plant PEBP sequences are key activators of flowering, comprising of amino acid sequences of the FT-like protein family with a distinct YAPGW-Motive in their loop region that is responsible for protein interaction (SEQ ID NO: 1-79). In another variant of this preferred embodiment, the plant based PEBPs are comprising the sequences of the TFL1-like proteins (SEQ ID NO: 175, 223-419). In yet another variant of this preferred embodiment, the plant based PEBPs are comprising of MFT-like proteins (SEQ ID NO: 420-517). In a preferred variant of this embodiment, the sequences correspond to PEBPs of a nicotiana subspecies (SEQ ID NO: 1,2, 46,47, 80-82, 182-184, 358-362, 482-484, 577-578). In a preferred variant of this embodiment, the sequences correspond to PEBPs of a nicotiana tabacum (SEQ ID NO: 1,2, 80-82, 361). In a most variant of this preferred embodiment, the sequence corresponds to the sequence of NtFT4 (SEQ ID NO: 1).

[0027] In a preferred embodiment of the invention, the non-vertebrate and/or artificial PEBP comprises, and preferably consists of, an amino acid sequence having at least 80%, 90%, 95%, 96%, 97%, 98%, 99% most preferably 100% sequence identity to a sequence shown in SEQ ID NO: 822 (CG7054), SEQ ID NO: 820 (CG10298), SEQ ID NO: 821 (CG18594) or SEQ ID NO: 1 (NtFT4).

[0028] In the present application, NtFT4 refers to the protein NtFT4 (Flowering locus T4, Flowering Locus T-like) of the organism Nicotiana tabacum (common tobacco). It belongs to the phosphatidylethanolamine-binding protein family and is coded by the gene FT4 (Also known as FT2, or LOC107824964). Additional data on this protein can accessed in uniprot as of 24. February 2021 under the file name J9WPJ0. The amino acid sequence of the only known variant of the protein is given in SEQ ID NO: 1.

[0029] In the present application, CG10298 refers to the protein CG10298 (also known as GH28351p) of the organism Drosophila melanogaster (fruit fly). It belongs to the phosphatidylethanolamine-binding protein family and is coded by the gene BcDNA:GH28351. Additional data on this protein can accessed in uniprot as of 24. February 2021 under the file name Q9VI08. The amino acid sequence of the only known variant of the protein is given in SEQ ID NO: 820.

[0030] In the present application, CG18594 refers to the drosophila melanogaster (fruit fly) protein CG18594, also known as LP12095p or the Drosophila melanogaster version of PEBP1. It belongs to the phosphatidylethanolamine-binding protein family and is coded by the gene Dmel\Pebp1. Additional data on this protein can accessed in uniprot as of 24. February 2021 under the file name Q9VD01. The amino acid sequence of the only known variant of the protein is given in SEQ ID NO: 821.

[0031] In the present application, CG7054 refers to the Drosophila melanogaster (fruit fly) protein CG7054, also known as GH14779p. It belongs to the phosphatidylethanolamine-binding protein family and is coded by the gene Dmel\CG7054. Additional data on this protein can accessed in uniprot as of 24. February 2021 under the file name Q9VD02. The amino acid sequence of the only known variant of the protein is given in SEQ ID NO: 822.

[0032] Generally, a PEBP used in accordance with the invention to generate a cell line with improved characteristics is a functional variant of any of the herein disclosed PEBP proteins. Preferably, if the invention pertains to a protein with a certain degree of sequence variability (variant PEBP) compared to a natural occurring PEBP, it is a preferred embodiment that the variant PEBP is a functional variant of the natural occurring PEBP. The variants and/or fragments are functional variants/fragments in that the variant sequence has similar or identical functional activity (such protein-protein interaction, and thereby for example inhibition of other proteins such as proteases) characteristics to the protein having the non-variant amino acid sequence specified herein (and this is the meaning of the term “functional variant” as used throughout this specification).

[0033] A “functional variant” or “functional fragment” of any of the above amino acid sequences, therefore, is any amino acid sequence which remains within the same protein class as the non-variant sequences. Methods of determining whether an enzyme falls within a particular category are well known to the skilled person, who can determine the enzyme category without use of inventive skill. Suitable methods may, for example, be obtained from the International Union of Biochemistry and Molecular Biology. Hence, a functional variant of a naturally occurring PEBP shall in accordance with the present invention retain all biologic function of the naturally occurring PEBP, but to a variant strength. As mentioned elsewhere, the phosphatidylethanolamine-binding protein (PEBP) family, is a small evolutionarily conserved group occurring in all taxa from bacteria to animals and plants (Kardailsky et al., 1999; Kobayashi et al., 1999), and the person of skill in the art may identify homologs and functional variants thereof.

[0034] The term “nucleic acid molecule” is meant to include DNA, RNA and mixed DNA-RNA sequences. In addition to the typically found A, T, U, G and C rsidues, a nucleic acid molecule may also include related residues such as, for example, inosine (I).

[0035] The term “polynucleotide” or “oligonucleotide” as used herein refers to a polymeric form of nucleotides of any length, either ribonucleotides or deoxyribonucleotides. This term refers only to the primary structure of the molecule. Thus, this term includes double and single stranded DNA, triplex DNA, as well as double and single stranded RNA. It also includes modified, for example, by methylation and/or by capping, and unmodified forms of the polynucleotide.

[0036] In a preferred embodiment of the invention, the vertebrate cell is a mammalian cell. Non limiting examples of mammalian cells comprise Chinese hamster ovary cells (CHO), murine myeloma cells (NSO, Sp2/O, C2C12), murine mammary tumor cells (C127), Baby Hamster Kidney Cells (BHK), hamster kidney cells (HaK) rat myeloma cell lines (YB2/0), monkey kidney cells (COS, Vero, CV-1), Murine Sertoli Cells (TM4), buffalo rat liver cells (BRL 3 A), canine kidney cells (MDCK), mouse fibroblast (NIH/3T3), rhesus monkey lung cells (FRhL-2), rat fibroblast cells (RAT-2), mouse bone marrow cells (FDCP-1, 32D cells), mouse lymphatic cells (BA/F3), rat adrenal gland cancer cells (PC12), as well as transformed primate cell lines, hybridomas, normal diploid cells, and cell strains derived from in vitro culture of primary tissue and primary explants. New animal cell lines can be established using methods well known by those skilled in the art (e.g., by transformation, viral infection, and/or selection). Any eukaryotic cell that is capable of expressing a protein of interest may be used in the disclosed cell culture methods. Numerous cell lines are available from commercial sources such as the American Type Culture Collection (ATCC). In one embodiment of the invention, the cell culture, e.g., the large-scale cell culture, employs hybridoma cells. The construction of antibody-producing hybridoma cells is well known in the art.

[0037] In another preferred embodiment of the invention, the vertebrate cell is a human cell. Non limiting examples of human cells comprise human embryonic kidney line (HEK293), human fibrosarcoma cells (HT-1080), human cervical carcinoma cells (HeLa), Human cembryonic retinal cells (PER.C6), human liver carcinoma cells (Hep G2, Huh-7), human lung cells (WI-38, MRC-5), human T-lymphocyte (Jurkat), human foreskin (FS-4), human epidermis cells (A431), human colon carcinoma (COLO 205), enteroendocrine cells (L-cells), human histocytic cells (U937), human leukemia cells (HL60), and/or human breast cancer cells (MCF-7). The cell may be derived from a suitable tissue including but not limited to blood, muscle, nerve, brain, heart, lung, liver, pancreas, spleen, thymus, esophagus, stomach, intestine, kidney, testis, ovary, hair, skin, bone, breast, uterus, bladder, spinal cord, or various kinds of body fluids. The cells may be derived from any developmental stage including embryo, fetal and adult stages, as well as developmental origin i.e., ectodermal, mesodermal, and endodermal origin.

[0038] The recombinant vertebrate cell of the invention is preferred, wherein the nucleic acid sequence is extra-chromosomal or intra-chromosomal. The term “extra-chromosomal” in context of a genetic element used herein refers to a genetic element other than a chromosome which is introduced into the cell line of the invention such as a virulence plasmid or which is an exogenous genetic element with which the vertebrate cell is transformed and which is transiently or stably integrated into the chromosome or into a genetic element other than a chromosome which is endogenously harboured such as a plasmid. Such an extra-chromosomal genetic element may be a vector like an expression vector, a vector for homologous recombination or other integration into the chromosome or into a genetic element other than a chromosome which is endogenously harboured such as a virulence plasmid, DNA fragments for homologous recombination or other integration into the chromosome or into a genetic element other than a chromosome which is endogenously harboured such as a plasmid. In contrast the term intra-chromosomal may be understood to relate to the introduction of a genetic element into the chromosomal structure of the recipient cell, for example by introducing the non-vertebrate or artificial PEBP gene sequence into an endogenous gene locus of the recipient cell, preferably into an endogenous PEBP gene.

[0039] In another preferred embodiment of the invention, the nucleic acid sequence is operatively linked to one or more genetic elements that allow for an inducible or constitutive expression of the non-vertebrate and/or artificial PEBP in the recombinant vertebrate cell. The term “inducible expression” is used to describe expression that requires interaction of an inducer molecule or the release of a co-repressor molecule and a regulatory protein for expression to take place. The term “constitutive expression” refers to expression which is not usually inducible.

[0040] The term “operatively-linked” means a first nucleic acid sequence linked to a second nucleic acid sequence when the first nucleic acid sequence is placed in a functional relationship with the second nucleic acid sequence. For instance, a promoter sequence of the present invention is operably linked to a coding sequence of a heterologous gene if the promoter affects the transcription or expression of the coding sequence.

[0041] The term “promoter region” refers to a DNA sequence that functions to control the transcription of one or more nucleic acid sequences, located upstream with respect to the direction of transcription of the transcription initiation site of the gene, and is structurally identified by the presence of a binding site for DNA-dependent RNA polymerase, transcription initiation sites and any other DNA sequences, including, but not limited to transcription factor binding sites, repressor and activator protein binding sites, calcium or cAMP responsive sites, and any other nucleotide sequences known to act directly or indirectly to regulate transcription from the promoter.

[0042] In another preferred embodiment of the invention, the one or more genetic elements comprises a promoter and/or terminator element, such as a CMV promoter and/or bGH terminator.

[0043] The term “heterologous DNA” or “heterologous RNA” refers to DNA or RNA that does not occur naturally as part of the genome or DNA or RNA sequence in which it is present, or in which it is found, a cell or location or locations in the genome or DNA or RNA sequence that differs from that which it is found in in nature. Heterologous DNA or RNA is not endogenous to the cell into which it is introduced, but has been obtained from another cell or synthetically or recombinantly produced. Generally, though not necessarily, such DNA encodes RNA and protein not normally produced by the cell in which the DNA is transcribed or expressed. Similarly exogenous RNA encodes protein not normally expressed in the cell in which the exogenous RNA is present. Heterologous DNA or RNA may also be referred to as foreign DNA or RNA. Any DNA or RNA that one of skill in the art would recognize as heterologous or foreign to the cell in which it is expressed is herein encompassed by the term heterologous DNA or heterologous RNA. Examples of heterologous DNA include, but are not limited to, DNA that encodes a protein, polypeptide, reporter nucleic acid sequence, transcriptional or translational regulatory sequences, selectable or traceable marker protein, such as a protein that confers drug resistance, RNA including mRNA and antisense RNA, and ribozymes.

[0044] The term “recombinant polynucleotide” as used herein refers to a polynucleotide of genomic, cDNA, semisynthetic or synthetic origin which, by virtue of its origin or manipulation: (1) is not associated with all or a portion of the polynucleotide with which it is associated in nature and/or (2) is linked to a polynucleotide other than that to which it is linked in nature.

[0045] The term “operably linked” refers to the linkage of a DNA segment to another DNA segment in such a way as to allow the segments to function in their intended manners. A DNA sequence encoding a gene product is operably linked to a regulatory sequence when it is ligated to the regulatory sequence, such as, for example, promoters, enhancers and/or silencers, in a manner which allows modulation of transcription of the DNA sequence, directly or indirectly. For example, a DNA sequence is operably linked to a promoter when it is ligated to the promoter downstream with respect to the transcription initiation site of the promoter, in the correct reading frame with respect to the transcription initiation site, and allows transcription elongation to proceed through the DNA sequence. An enhancer or silencer is operably linked to a DNA sequence coding for a gene product when it is ligated to the DNA sequence in such a manner as to increase or decrease, respectively, the transcription of the DNA sequence. Enhancers and silencers may be located upstream, downstream or embedded within the coding regions of the DNA sequence. A DNA for a signal sequence is operably linked to DNA coding for a polypeptide if the signal sequence is expressed as a preprotein that participates in the secretion of the polypeptide. Linkage of DNA sequences to regulatory sequences is typically accomplished by ligation at suitable restriction sites or via adapters or linkers inserted in the sequence using restriction endonucleases known to one of skill in the art.

[0046] In another preferred embodiment of the invention, the vertebrate cell expressing the non-vertebrate and/or artificial PEBP compared to the same vertebrate cell not expressing the non-vertebrate and/or artificial PEBP has a significantly increased vitality, growth and proliferation.

[0047] In the second aspect, the invention pertains to a method for producing a cell line with improved characteristics selected from cell vitality, cellular protein expression and cell growth, the method comprising the steps of providing a candidate vertebrate cell of a selected vertebrate species, introducing into the vertebrate cell a non-vertebrate and/or artificial phosphatidylethanolamine-binding protein (PEBP) to obtain a cell with improved characteristics, and culturing the cell with improved characteristics to obtain the cell line with improved characteristic.

[0048] Introduction of a genetic element for the expression of a PEBP in accordance with the invention usually comprises a step of stably or transiently transfecting or transducing one or more cells with a genetic construct encoding for the PEBP. The term “gene” is used broadly to refer to any segment of nucleic acid associated with a biological function. Thus, genes include coding sequences and/or the regulatory sequences required for their expression. For example, “gene” refers to a nucleic acid fragment that expresses mRNA, functional RNA, or specific protein, including regulatory sequences. “Genes” also include non-expressed DNA segments that, for example, form recognition sequences for other proteins. “Genes” can be obtained from a variety of sources, including cloning from a source of interest or synthesizing from known or predicted sequence information, and may include sequences designed to have desired parameters.

[0049] The terms “gene introduction” or “gene delivery” or “gene transfer” refers to methods or systems for reliably inserting foreign DNA into target cells and include transduction, transfection and transformation. Such methods can result in transient or long term (stable) expression of genes. The term “transduction” refers to the delivery of a DNA molecule to a recipient cell either in vivo or in vitro, via a replication-defective viral vector, such as, e.g., adenoviral vector. The term “transfection” is used to refer to the uptake of foreign DNA by a vertebrate cell. A cell has been “transfected” when exogenous DNA has been introduced across the cell plasma membrane. Transfection can be used to introduce one or more exogenous DNA moieties, such as a plasmid vector and other nucleic acid molecules, into suitable cells. The term refers to both stable and transient uptake of the genetic material. The term “transformation” refers to a process for introducing heterologous DNA into a cell. Transformed cells are understood to encompass not only the end product of a transformation process, but also transgenic progeny thereof.

[0050] The term “vector” refers to any genetic element, such as a plasmid, phage, transposon, cosmid, chromosome, virus, virion, etc., which is capable of replication when associated with the proper control elements, such as a helper virus, and which can transfer gene sequences between cells. Thus, the term includes cloning and expression vehicles, as well as replication-defective viral vectors.

[0051] The terms “expression vector” and “expression cassette” refer to a nucleic acid molecule capable of directing expression of a particular nucleotide sequence in an appropriate host cell, typically comprising a promoter operatively linked to the nucleotide sequence of interest which is operatively linked to termination signals. It also typically comprises sequences required for proper translation of the nucleotide sequence. The coding region usually encodes a polypeptide(s) of interest but can also encode a functional RNA of interest, for example antisense RNA or a non-translated RNA, in the sense or antisense direction. The expression cassette comprising the nucleotide sequence of interest can be chimeric, meaning that at least one of its components is heterologous with respect to at least one of its other components. The expression cassette can also be one that is naturally occurring but has been obtained in a recombinant form useful for heterologous expression. Typically, however, the expression cassette is heterologous with respect to the host; i.e., the particular DNA sequence of the expression cassette does not occur naturally in the host cell and was introduced into the host cell or an ancestor of the host cell by a transformation event. The expression of the nucleotide sequence in the expression cassette can be under the control of a constitutive promoter or of an inducible promoter that initiates transcription only when the host cell is exposed to some particular external stimulus. In the case of a multicellular organism such as a plant, the promoter can also be specific to a particular tissue, organ, or stage of development.

[0052] In a preferred embodiment of this aspect the non-vertebrate and/or artificial PEBP is a heterologous protein to the selected vertebrate species, preferably the selected vertebrate species of the recombinant cell line.

[0053] In a preferred embodiment of the invention, the non-vertebrate and/or artificial PEBP is introduced into the candidate vertebrate cell as genetic expression construct comprising a nucleic acid sequence encoding the non-vertebrate and/or artificial PEBP.

[0054] In another preferred embodiment of the invention, wherein the candidate vertebrate cell is a mammalian cell.

[0055] In another preferred embodiment of the invention, wherein the candidate vertebrate cell is a human cell.

[0056] In another preferred embodiment of this aspect, the non-vertebrate and/or artificial PEBP is a plant or insect PEBP.

[0057] In yet another preferred embodiment of this aspect, the non-vertebrate and/or artificial PEBP consists of an amino acid sequence that when aligned with the sequence of SEQ ID NO: 623 (human PEBP1) does not comprise the most C terminal alpha helix.

[0058] In a preferred embodiment of the previous embodiment, the nucleic acid sequence is operatively linked to one or more genetic elements that allow for an inducible or constitutive expression of the non-vertebrate and/or artificial PEBP in the candidate vertebrate cell.

[0059] In another preferred embodiment the one or more genetic elements comprises a promoter and/or terminator element, such as a CMV promoter and/or bGH terminator.

[0060] In another aspect there is provided an isolated nucleic acid construct suitable for recombinant expression in a vertebrate cell or cell line, comprising a coding element operatively linked with one or more expression elements which is suitable for regulating protein expression in the vertebrate cell, wherein the coding element comprises a nucleic acid sequence encoding a non-vertebrate and/or artificial phosphatidylethanolamine-binding protein (PEBP).

[0061] Another aspect pertains to a method for recombinant expression of a target protein, comprising a step of culturing under suitable conditions a recombinant vertebrate cell of any one of the preceding claims, wherein the recombinant vertebrate cell further comprises an expression construct encoding the target protein.

[0062] In this further aspect the present invention relates to a method of producing a protein of interest recombinantly in a cell of the invention, comprising: (a) cultivating the inventive cell under conditions conducive for production of the protein; and (b) recovering the protein. Particularly the protein is a heterologous protein.

[0063] Optionally, the method may include a first step of transfecting/transducing an expression construct for the target protein/polypeptide into the cell.

[0064] The methods used for cultivation and purification of the product of interest may be performed by methods known in the art.

[0065] The terms “of the [present] invention”, “in accordance with the invention”, “according to the invention” and the like, as used herein are intended to refer to all aspects and embodiments of the invention described and/or claimed herein.

[0066] As used herein, the term “comprising” is to be construed as encompassing both “including” and “consisting of”, both meanings being specifically intended, and hence individually disclosed embodiments in accordance with the present invention. Where used herein, “and/or” is to be taken as specific disclosure of each of the two specified features or components with or without the other. For example, “A and/or B” is to be taken as specific disclosure of each of (i) A, (ii) B and (iii) A and B, just as if each is set out individually herein. In the context of the present invention, the terms “about” and “approximately” denote an interval of accuracy that the person skilled in the art will understand to still ensure the technical effect of the feature in question. The term typically indicates deviation from the indicated numerical value by ±20%, ±15%, ±10%, and for example ±5%. As will be appreciated by the person of ordinary skill, the specific such deviation for a numerical value for a given technical effect will depend on the nature of the technical effect. For example, a natural or biological technical effect may generally have a larger such deviation than one for a man-made or engineering technical effect. As will be appreciated by the person of ordinary skill, the specific such deviation for a numerical value for a given technical effect will depend on the nature of the technical effect. For example, a natural or biological technical effect may generally have a larger such deviation than one for a man-made or engineering technical effect. Where an indefinite or definite article is used when referring to a singular noun, e.g. “a”, “an” or “the”, this includes a plural of that noun unless something else is specifically stated.

[0067] It is to be understood that application of the teachings of the present invention to a specific problem or environment, and the inclusion of variations of the present invention or additional features thereto (such as further aspects and embodiments), will be within the capabilities of one having ordinary skill in the art in light of the teachings contained herein.

[0068] Unless context dictates otherwise, the descriptions and definitions of the features set out above are not limited to any particular aspect or embodiment of the invention and apply equally to all aspects and embodiments which are described.

[0069] All references, patents, and publications cited herein are hereby incorporated by reference in their entirety.

[0070] The terms “of the [present] invention”, “in accordance with the invention”, “according to the invention” and the like, as used herein are intended to refer to all aspects and embodiments of the invention described and/or claimed herein.

[0071] As used herein, the term “comprising” is to be construed as encompassing both “including” and “consisting of”, both meanings being specifically intended, and hence individually disclosed embodiments in accordance with the present invention. Where used herein, “and/or” is to be taken as specific disclosure of each of the two specified features or components with or without the other. For example, “A and/or B” is to be taken as specific disclosure of each of (i) A, (ii) B and (iii) A and B, just as if each is set out individually herein. In the context of the present invention, the terms “about” and “approximately” denote an interval of accuracy that the person skilled in the art will understand to still ensure the technical effect of the feature in question. The term typically indicates deviation from the indicated numerical value by ±20%, ±15%, ±10%, and for example ±5%. As will be appreciated by the person of ordinary skill, the specific such deviation for a numerical value for a given technical effect will depend on the nature of the technical effect. For example, a natural or biological technical effect may generally have a larger such deviation than one for a man-made or engineering technical effect. As will be appreciated by the person of ordinary skill, the specific such deviation for a numerical value for a given technical effect will depend on the nature of the technical effect. For example, a natural or biological technical effect may generally have a larger such deviation than one for a man-made or engineering technical effect. Where an indefinite or definite article is used when referring to a singular noun, e.g. “a”, “an” or “the”, this includes a plural of that noun unless something else is specifically stated.

[0072] It is to be understood that application of the teachings of the present invention to a specific problem or environment, and the inclusion of variations of the present invention or additional features thereto (such as further aspects and embodiments), will be within the capabilities of one having ordinary skill in the art in light of the teachings contained herein.

[0073] Unless context dictates otherwise, the descriptions and definitions of the features set out above are not limited to any particular aspect or embodiment of the invention and apply equally to all aspects and embodiments which are described.

[0074] All references, patents, and publications cited herein are hereby incorporated by reference in their entirety.

### BRIEF DESCRIPTION OF THE FIGURES AND SEQUENCES

[0075] The figures show:

[0076] FIGS. 1(A)-1(F): Drosophila CG18594 PEBP induces mesenchymal traits in MCF-7 cells. Effects of CG18594 on the induction of apoptosis, cell proliferation, migration and the expression and localization of epithelial or mesenchymal markers. FIG. 1A: Apoptosis was induced by 10 ng/mL TNFα (TOP) or 500 nM staurosporine (BOTTOM) for 24 h in MCF-7 cells expressing PEBP1, PEBP4, CG18594, CG10298, NtFT2 or NtFT4, and in MCF-7 control cells. Quantification of apoptotic cells in all cell lines induced by TNFα (TOP) or staurosporine (BOTTOM) (mean±s.e.m., n=9 biologically independent samples (MCF-7 TNFα-induced n=6), p value from Welch's t-test, ***p<0.001, **p<0.01, *p<0.05, N.S. not significant). FIG. 1B: (TOP): Proliferation of MCF-7, MCF-7_{CG18594} and MCF7_{NtFT4} cells. (BOTTOM): BrdU incorporation by proliferating cells after 2 h was quantified by fluorescence microscopy in relation to total cells stained with DAPI (representative image detail, right) (mean±s.e.m., n=6 random pictures with >200 cells, p value from Welch's t-test, **p<0.01, scale bar 50 μm). FIG. 1C: Migration of MCF-7, MCF-7_{CG18594} and MCF-7_{NtFT4} cells through the 8-μm pores of a Boyden chamber. Serum served as chemoattractant for 24 h and cells were stained with crystal violet for quantification (mean±s.e.m., n=10 random pictures, p value from Welch's t-test, ***p<0.001, *p<0.05). FIG. 1D: Mesenchymal-like morphological changes of MCF-7_{CG18594} cells. Immunofluorescent staining of E-cadherin in MCF-7 (TOP) and MCF-7_{CG18594} cells (BOTTOM) and quantification of fluorescence intensity across a linear ROI (white bar). Peak differences between intensities measured from membrane-bound (high values) and cytosolic E-cadherin (low values) (scale bar=25 μm). FIG. 1E: Immunodetection of total E-cadherin protein and its cleavage products in MCF-7 and MCF-7_{CG18594} cells. The full-length E-cadherin is indicated by a filled arrowhead and the two main cleavage products that increase in MCF-7_{CG18594} cells (˜50 kDa, ˜33 kDa) are marked by empty arrowheads. GAPDH was used as a reference. FIG. 1F: Gene expression analysis by qRT-PCR of epithelial and mesenchymal markers in MCF-7 and MCF-7_{CG18594} cells in relation to GAPDH (mean±s.e.m., n=3 biologically independent samples, p value from Welch's t-test, ***p<0.001, **p<0.01, *p<0.05, N.S. not significant).

[0077] FIGS. 2(A)-2(C): NtFT4 forms aggregates, recruits several human interaction partners and thereby amplifies the insulin response in human cells. FIG. 2A: Subcellular localization of HA-EGFP-tagged NtFT4 and CG18594 in HEK-293T cells. Cells were transiently transfected with pcDNA3-HA-EGFP (green=HA-EGFP-NtFT4 top line, HA-EGFP-CG18594 middle line and HA-EGFP bottom line) and pcDNA3-myc-mRFP-H2AZ (red) constructs and imaged 24 h post-transfection. Scale bar 10 μm FIG. 2B: Mediators of NtFT4 in human cells based on protein-protein interactions. Interaction partners of HA-EGFP-NtFT4 were identified by protein quantification in eluates. Protein extracts of cells transiently expressing HA-EGFP and HA-EGFP-NtFT4 were precipitated using anti-HA-labeled magnetic beads, digested with trypsin and analyzed by LC-MS/MS. Differential protein abundance was plotted as log₂ fold changes in HA-EGFP-NtFT4 samples against corresponding p values. Enriched proteins in the HA-EGFP-NtFT4 samples are indicated by color coding from blue to red. Insulin-responsive adhesion proteins DSGi, DSCi and PKP1 are underlined (n=3 biologically independent samples, p values were calculated using the Bayes moderated t-test with default settings). FIG. 2C: Growth response of MCF-7, MCF-7NtFT4 and MCF-7_{CG18594} cells to insulin. Serum-starved cells were induced with 40 μg/mL recombinant insulin or with serum-free medium for 48 h and viable cells were quantified (mean ±s.e.m., n=9 biologically independent samples; MCF-7_{NtFT4} insulin-exposed n=8, MCF-7_{CG18594} insulin exposed and starved cells n=12), p value from Welch's t-test, ***p<0.001, **p <0.01).

[0078] FIG. 3: Transcriptome analysis of MCF-7_{NtFT4} cells. MCF-7 and MCF-7_{NtFT4} cells were exposed to 40 μg/mL recombinant insulin or starved in serum-free medium, followed by whole-transcriptome MACE analysis and pairwise comparisons. The figure gives shows an overview of deregulated genes in MCF-7 and MCF-7_{NtFT4} cells. Pairwise comparisons between insulin-induced and starved cells. Venn diagrams show common responses in the overlap and differential responses in gene expression to insulin exposure. Genes with an FDR <0.05 were included (n=3 biologically independent samples).

[0079] FIG. 4: Specific PEBP signaling pathway mediated by NtFT4. Overview of PEBP signaling altered by NtFT4 expression. Human PEBPs regulate cell proliferation and apoptosis by crosstalk among various signaling pathways (RTK-MAPK, GPCR, NFK(B) Notch and Shh). PEBP1 acts as switch between GPCR and MAPK signaling in a phosphorylation-dependent manner, binding and thereby inhibiting the phosphorylation/activation of either Raf or GRK2. PEBP1 can also bind IKK subunits to inhibit NF-KB signaling and it can inhibit the cleavage and translocation of NCID to the nucleus downstream of Notchi. PEBP4 also intervenes in the MAPK cascade, possibly modulating between MAPK signaling and AKT1. NtFT4 was shown to specifically induce cell proliferation and survival without reducing protein synthesis. A specific function of NtFT4 combines cellular responses that affect cell adhesion, proliferation and differentiation. This involves integrins, desmosomes, insulin-AKTi and NF-KB signaling. The interaction of HA-EGFP-NtFT4 with desmosomal cadherins 963 and cytosolic PKP1 and JUP suggests a specific role in cell adhesion via desmosomes. The enhanced induction of proliferation following insulin exposure is likely to be mediated by the translocation of desmosomal components to the nucleus where they have been shown to induce proliferation. Additionally, transcriptome analysis revealed enhanced expression of genes associated with cell adhesion and interaction with the extracellular matrix (integrins, collagens and ECM-modifying MMP13, MMP15, MMP17 and TIMP2, TIMP3) linking cell adhesion to the observed increase in the proliferation of MCF-7_{NtFT4} cells. In the cytosol, deregulated genes indicate specific changes in signaling via insulin and Akti by an increase of BMPs (BMP1, BMP4, BMP8B) and IL18. Other key regulators in this pathway are not affected specifically by NtFT4. In the signaling cascade involving the translocation of NF-κB the nucleus, the expression of Nfkbiz is specifically increased in MCF7-7_{NtFT4} cells. The transcription factor SOX9 is upregulated in the nucleus of MCF7-7_{NtFT4} cells, as well as slight increases in FOXO1 and FOXO3. Insulin exposure did not downregulate 4EBP3 in MCF7-7_{NtFT4} cells (in contrast to MCF-₇ cells) and had differing effects on the transcription of various ribosomal S6 kinases. Red arrows indicate transcriptional upregulation. Blue arrows indicate interaction with HA-EGFP-NtFT4. Dashed arrows indicate protein translocation.

[0080] FIGS. 5(A)-5(C): Improved growth and transfection efficiency in HEK-293T_{NtFT4} cells. FIG. 5A: Viable cell density and cell viability of HEK-293T (squares), HEK-293T_{CG18594} (triangles) and HEK-293T_{NtFT4} (circles) cells adapted to RPMI-1640+1% FCS in 40-mL suspension cultures. Viable cell density (solid lines) and cell viability (dashed lines) were measured in batch cultures for 12 days until all lines surpassed their VCD peaks. Representatively shown for n=1. FIG. 5B: Viable cell density and cell viability of HEK-293T (squares) and HEK-293T_{NtFT4} (circles) cells grown in 250 mL ExCELL medium in Optimum Growth flasks (Thomson) were measured in batch cultures of three different cell passages of HEK-293T and HEK-293T_{NtFT4} cells (passage ranging between P2-8). n=3 FIG. 5C: Transient transfection efficiency of HEK-293T (TOP) cells and HEK-293T_{NtFT4} (BOTTOM) cells with pcDNA3Lifeact-mRFP was quantified by FACS analysis. Aliquots of cells were harvested after 1-4 days and after gating for viable, single cells (FIG. 9), cells with a distinct mRFP signal were quantified according to the indicated gate (grey). Data were analyzed using Flowing Software v2.5.1.

[0081] FIGS. 6(A)-6(F): Improved protein expression in HEK-293T_{NtFT4} cells. HEK-293T and HEK-293T_{NtFT4} cells were transiently transfected with pAPT-1E4IgG1 and antibody yield was quantified in the supernatants. FIG. 6A Immunodetection of IgG1 4 days after transfection with different plasmid and PEI concentrations (plasmid=10-30 μg/mL, PEI=30-90 μg/mL). Quantification of band intensities using ImageJ v1.501 revealed highest yield using 20 μg/mL plasmid and 60 μg/mL PEI (arrowhead). FIG. 6B: Viable cell density (solid lines) and cell viability (dashed lines) of HEK-293T (squares) cells and HEK-293T_{NtFT4} (circles) cells after transient transfection with pAPT-1E4-IgG1. Aliquots of cells were analyzed on each day after transfection until protein expression reached a steady state (mean±s.e.m., n=3 biologically independent samples). FIG. 6C: Yield of human IgG1 in the supernatants of HEK-293T (circles) cells and HEK-293T_{NtFT4} (squares) cells analyzed by ELISA (mean±s.e.m., n=3 biologically independent samples). FIG. 6D: Quantification of IgGi protein in the supernatants of HEK-293T and HEK-293T_{NtFT4} cells of days 2-6 by western blot using anti-human κ light chain antibody of reduced samples and measuring relative band intensities using ImageJ v1.50i. FIG. 6E: Immunodetection of IgG1 after transient transfection in HEK-293T_{NtFT4} cells and Avastin using non-reducing (left lanes) and reducing (right lanes) loading buffer to analyze correct antibody assembly of heavy and light chains. Under reducing conditions only the kappa-light chains are detected for transiently expressed IgGi (left) and Avastin (right), empty arrowheads. Under non-reducing conditions the assembled antibodies (filled arrowheads) are detected for both the transiently expressed IgG1 and Avastin. FIG. 6F: Expression of NtFT4 in HEK-293T_{NtFT4} cells. Prior to experiments, NtFT4 expression was verified by sqRT-PCR using GAPDH as the reference gene.

[0082] FIGS. 7(A)—7(B): Peptide sequence alignment and 3D protein models of PEBP1, PEBP4, NtFT2, NtFT4, CG18594 and CG10298. FIG. 7A: Sequences of human PEBP1 (NP_002558.1) and PEBP4 (NP_659399.2), Nicotiana tabacum NtFT2 (AFY06688.1) and NtFT4 (AFS17372), and Drosophila melanogaster CG18594 (NP_651051.1) and CG10298 (NP_649643.1) were aligned using Clustal Omega (https://www.ebi.ac.uk/Tools/msa/clustalo). Identical amino acids are indicated by black boxes, and similar amino acids by gray boxes. The highly conserved region of PEBPs (binding pocket) is marked by a blue line. Phosphorylation sites in PEBP1 (T42 and 5¹53) are marked by red asterisks and are responsible for the interaction and thus function switches of PEBP1. The decisive motifs of NtFT2 and NtFT4 (NAPDIIDS and YAPGW, respectively) are marked by the green line. In PEBP1, this loop region is affected by phosphorylation of S153. The region of the C-terminal α-helices of animal PEBPs is marked by an orange line. FIG. 7B: Protein models of PEBPs were created using SWISS-MODEL (https://swissmodel.expasy.org/). Human, bovine, mouse and rat RKIP served as the main templates for human and fly PEBPs. These were supplemented with fly PEBP CG7054 and TM16 from Trichuris muris for CG10298 and CG18594. Protein models for NtFT2 and NtFT4 were created using FT from Arabidopsis thaliana under different conditions as template. The α-helices and β-strands are highlighted in blue and green, respectively. The loop region, which appears to be critical for protein interaction, was turned facing the top right and is flanked by the α-helix containing S153 (PEBP1) and the sequence motifs defining plant NtFT proteins (red arrow). The C-terminal α-helices of animal PEBPs are indicated by gray arrows.

[0083] FIGS. 8(A)-8(B): Expression analysis of survival and cell cycle related genes. Analysis of gene expression by qRT-PCR in relation to GAPDH. FIG. 8A: Genes related to cell survival or FIG. 8B cell cycle regulation in MCF-7 and MCF-7_{CG18594} cells (mean ±s.e.m., n=3 biologically independent samples, p value from Welch's t-test, ***p<0.001, **p<0.01, *p<0.05, N.S. not significant).

[0084] FIGS. 9(A)-9(B): Gating strategy for FACS analysis and quantification of transfection efficiency in HEK-293T and HEK-293T_{NtFT4} cells. FIG. 9A: Intact cells were initially gated, excluding cell debris and larger cell aggregates (dot plot TOP LEFT, grey population). For subsequent analysis, only single cells (dark grey population, TOP RIGHT) were selected, plotting the population of intact cells against the area and height of FSC signals (FSC-A and FSC-H, respectively). For the analysis of transiently transfected cells with pcDNA3-LifeActmRFP, histograms of events detected at 610±20 nm were plotted (BOTTOM). The gate was set using non-transfected control cells with a maximum of 0.1% of the single cells in this gate (grey gate, BOTTOM RIGHT). The percentage of cells in this gate was quantified using Flowing Software v2.5.1 (BOTTOM LEFT, representative data for HEK-293T_{NtFT4} cells 3 days after transfection) FIGS. 9B: Transient transfection efficiency (using 20 μg/mL pcDNA3-LifeAct-mRFP and 60 μg/mL PEI) of HEK-293T (black line) and HEK-293T_{NtFT4} (grey line) cells up to 4 days post-transfection.

[0085] FIGS. 10(A)-10(D): Gene integration and expression in MDA-MB231 and MCF-7 cell lines. FIG. 10A and FIG. 10C: Verification of correct integration into the AAVS1 safe harbor locus by 5′ and/or 3′ border PCR and agarose gel electrophoresis. A primer pair for each border was used, one primer binding to the adjacent chromosomal region and the other to the integrated sequence. MDAMB231 (FIG. 10A) and MCF-7 (FIG. 10C) lines carrying the expression cassettes for human PEBP1 and PEBP4, tobacco NtFT2 and NtFT4, and fruit fly CG10298 and CG18594 were verified. FIG. 10B and FIG. 10D: Verification of gene expression in clonal lines expressing the different PEBPs by sqRT-PCR. GAPDH expression was included as reference and GFP expression to verify expression of the selection marker GFP-2A-Puromycin. FIG. 10B: Expression of PEBPs in MDA-MB231 and MDAMB231_{PEBP} cells. FIG. 10D: Expression of PEBPs in MCF-7 and MCF-7_{PEBP} cells.

[0086] And in the sequences:

[0087] The following sequences are of particular exemplary use in context of the invention:

[0088] SEQ ID NO: 623 shows sp|P30086|PEBP1_HUMAN Phosphatidylethanolamine-binding protein 1 OS=Homo sapiens OX=9606 GN=PEBP1 PE=1 SV=3

MPVDLSKWSGPLSLQEVDEQPQHPLHVTYAGAAVDELGKVLTPTQVKNRP
TSISWDGLDSGKLYTLVLTDPDAPSRKDPKYREWHHFLVVNMKGNDISSG
TVLSDYVGSGPPKGTGLHRYVWLVYEQDRPLKCDEPILSNRSGDHRGKFK
VASFRKKYELRAPVAGTCYQAEWDDYVPKLYEQLSGK

[0089] SEQ ID NO: 624 shows >sp|Q96S96|PEBP4_HUMAN Phosphatidylethanolamine-binding protein 4 OS=Homo sapiens OX=9606 GN=PEBP4 PE=1 SV=3

MGWTMRLVTAALLLGLMMVVTGDEDENSPCAHEALLDEDTLFCQGLEVFY
PELGNIGCKVVPDCNNYRQKITSWMEPIVKFPGAVDGATYILVMVDPDAP
SRAEPRQRFWRHWLVTDIKGADLKKGKIQGQELSAYQAPSPPAHSGFHRY
QFFVYLQEGKVISLLPKENKTRGSWKMDRFLNRFHLGEPEASTQFMTQNY
QDSPTLQAPRERASEPKHKNQAEIAAC

[0090] SEQ ID NO: 822 shows >tr|Q9VD02|Q9VD02_DROME GH14779P OS=Drosophila melanogaster OX=7227 GN=Dmel\CG7054 PE=1 SV=1

MDDIVPDVLDAVPAGTIKVIYGDDLEVKQGNELTPTQVKDQPIVSWSGLE
GKSNLLTLLMVDPDAPTRQDPKYREILHWSVVNIPGSNENPSGGHSLADY
VGSGPPKDTGLHRYIFLLYRQENKIEETPTISNTTRTGRLNFNARDFAAK
HGLGEPIAANYYQAQYDDYVPIRNKTIVG

[0091] SEQ ID NO: 820 shows >tr|Q9VI08|Q9VI08_DROME GH28351P OS=Drosophila melanogaster OX=7227 GN=BcDNA:GH28351 PE=2 SV=1

MSDSTVCFSKHKIVPDILKTCPATLLTVTYGGGQVVDVGGELTPTQVQSQ
PKVKWDADPNAFYTLLLTDPDAPSRKEPKFREWHHWLVVNIPGNQVENGV
VLTEYVGAGPPQGTGLHRYVFLVFKQPQKLTCNEPKIPKTSGDKRANFST
SKFMSKYKLGDPIAGNFFQAQWDDYVPKLYKQLSGKK

[0092] SEQ ID NO: 821 shows >tr|Q9VD01|Q9VD01_DROME LP12095P OS=Drosophila melanogaster OX=7227 GN=Pebpi PE=1 SV=1

MDTAGIIPDIIDVKPASKATITYPSGVQVELGKELTPTQVKDQPTVVFDA
EPNSLYTILLVDPDAPSREDPKFRELLHWLVINIPGNKVSEGQTIAEYIG
AGPREGTGLHRYVFLVFKQNDKITTEKFVSKTSRTGRINVKARDYIQKYS
FGGPVAGNFFQAQYDDYVKTLIETVQ

[0093] SEQ ID NO: 82 shows TOBAC Flowering locus T-like protein FT2 (Nicotiana tabacum)

MLRANPLVVSGVIGDVLDPFTKSVDFDVVYNNNVQVYNGCGLRPSQIVNQ
PRVDIAGDDFRTFYTLVMVDPDAPTPSNPNLREYLHWLVTDIPATTEATF
GNEIVSYERPQPSLGIHRYIFVLFRQLDREVVNAPDIIDSREIFNTRDFA
RFHGLNLPVAAVYFNCNREGGTGGRHL

[0094] SEQ ID NO: 1 shows >tr|J9WPJ0|J9WPJ0_TOBAC Flowering locus T OS=Nicotiana tabacum OX=4097 GN=FT4 PE=2 SV=1

MPRIDPLIVGRVVGDVLDPFTRSVDLRVVYNNREVNNACGLKPSQIVTQP
RVQIGGDDLRNFYTLVMVDPDAPSPSNPNLREYLHWLVTDIPATTDTSFG
NEVICYENPQPSLGIHRFVFVLFRQLGRETVYAPGWRQNFSTRDFAEVYN
LGLPVSAVYFNCHRESGTGGRRAY

[0095] The sequence protocol comprises the following sequence:

[0096] SEQ ID Nos: 1-622 show plant PEBP amino acid sequences,

[0097] SEQ ID Nos: 623-624 show homo sapiens amino acid sequences,

[0098] SEQ ID Nos: 625-819 show mammalian amino acid sequences,

[0099] SEQ ID Nos: 820-928 show insect PEBPs amino acid sequences,

[0100] SEQ ID Nos: 929-1127 show prokaryote PEBP amino acid sequences,

[0101] SEQ ID Nos: 1128-1270 show fungi PEBP amino acid sequences,

[0102] SEQ ID Nos: 1271-1368 show primer nucleic acid sequences of table 1,

[0103] SEQ ID Nos: 1369-1370 show amino-acid sequences of protein interaction motifs.

### EXAMPLES

[0104] Certain aspects and embodiments of the invention will now be illustrated by way of example and with reference to the description, figures and tables set out herein. Such examples of the methods, uses and other aspects of the present invention are representative only, and should not be taken to limit the scope of the present invention to only such representative examples.

[0105] The examples show:

[0106] Example 1: CG18594 induces mesenchymal traits, promoting apoptotic resistance and proliferation in MCF-7 cells. Initially, the pro-apoptotic activity of PEBP1 and the anti-apoptotic activity of PEBP4 in the human breast cancer cell line MCF-7 were investigated, confirming their reported properties (FIG. 1A). Among the non-human PEBPs, CG18594 in particular conferred pronounced apoptotic resistance (FIG. 1A), increasing the ability of MCF-7 cells to inhibit responses to TNFα, in a similar manner to PEBP4.

[0107] The ability of MCF-7_{CG18594} cells to resist apoptosis was surprising because CG18594 sequence alignments and protein models indicated higher similarity to PEBP1 than PEBP4 (42.6% vs. 27.0%, FIG. 7). In the control line, the ratio of apoptotic MCF-7 cells increased by 26.1% from 8.0% (±1.5%) without treatment to 34.1% (±2.7%) in the presence of TNFα. In the two most resistant lines, TNFα increased the proportion of apoptotic cells by only 8.5% (MCF-7_{CG18954}) and 12.3% (MCF-7PEBP₄). In contrast, NtFT4 and NtFT2 acted in a similar manner to PEBP1, increasing TNFα sensitivity (MCF-7NtFT4+43.7%; MCF-7NtFT2+30.1%; MCF-7_{PREP1}+33.0%). Finally, CG10298 showed no significant effect on the induction of apoptosis by TNFα (FIG. 1A).

[0108] CG18594 also induced the proliferation of MCF-7 cells (+25.5% BrdU incorporation in MCF-7_{CG18594} vs. MCF-7, FIG. 1B). This was confirmed by analyzing the doubling times of MCF-7 cells in monolayer cultures. In T25 flasks, the doubling time of MCF-7_{CG18594} cells declined by 7.6% compared to MCF-7 controls. A more pronounced decline when cells were visualized by live imaging in 384-well plates was observed. Here, the doubling time of the MCF-7_{CG18ﬄ}cells (determined by measuring the confluence) was reduced by 61.4%.

[0109] The analysis of MCF-7_{CG18594} cell growth also revealed a partial change toward a mesenchymal-like morphology, which was confirmed by the slight loss of apical-basal polarity during MCF-7_{CG18594} cell migration (FIG. 1C). This reflected the altered distribution of E-cadherin in MCF-7_{CG18594} cells, with less distinct localization to the membrane (FIG. 1D). According to qRT-PCR data, the E-cadherin gene (CDH1) was expressed normally, but the abundance of the full-length protein (135 kDa) declined due to enhanced cleavage, which caused the accumulation of cytoplasmic fragments and thus altered E-cadherin signaling (FIG. 1E, FIG. 1F). The mesenchymal markers N-cadherin, Snai1, Snai2 and vimentin were barely detectable whereas the epithelial markers E-cadherin and β-catenin, as well as the cytokeratins Krt18 and Krt19, remained strongly expressed in MCF-7_{CG18594} cells (FIG. 1F). Even so, various survival genes and cell cycle regulators were slightly induced in the MCF-7_{CG18594} cells (FIG. 8). CG18594 thus appears to confer some mesenchymal traits (apoptotic resistance, migratory capacity, partial loss of polarity) but does not induce a full epithelial to mesenchymal transition in MCF-7 cells.

[0110] Example 2: NtFT4 amplifies the insulin response in MCF-7 cells. NtFT4 and NtFT2 increased the sensitivity of MCF-7 cells toward TNFα in a similar manner to PEBP1. However, PEBP1 had no effect on growth and NtFT2 reduced the growth rate of MCF-7 and MDA-MB231 cells, whereas NtFT4 was the only PEBP to induce proliferation in both MCF-7 (+2.03%) and MDA-MB231 cells (+5.67%). The analysis of BrdU incorporation revealed an even greater increase in the proliferation of MCF-7_{NtFT4} cells (+20.7% vs. MCF-7, FIG. 1B), and live-cell imaging produced a similar result (−22.7% doubling time,). The two latter techniques are likely to be more accurate because they do not require cell detachment prior to counting, which was influenced by the effect of NtFT4 on cell adhesion. The proliferation of MCF-7_{CG18594} was associated with the partial expression of mesenchymal traits, whereas NtFT4 appeared to interfere directly with epithelial cell junction proteins and their cell signaling pathways. The transient expression of HA-EGFP-NtFT4 together with myc-mRFP-H2AZ revealed the different subcellular localization of NtFT4 and CG18594 (FIG. 2A). Whereas HA-EGFP-CG18594 was located uniformly throughout the cell, like HA-EGFP, HA-EGFP-NtFT4 accumulated in the nucleus and also appeared to form aggregates in the cytoplasm.

[0111] Immunoprecipitation of HA-EGFP-NtFT4 interaction complexes followed by LC-MS/MS revealed that multiple NtFT4 interaction partners were associated with epithelial cell adhesion, especially components of desmosomes. These not only stabilize cell junctions but also act as components in the insulin signal transduction pathway, translocating from the membrane to the nucleus to induce proliferation (see FIG. 2B). Therefore MCF-7_{NtFT4} and MCF-7_{CG18594} cells were investigated for their response to insulin. Although cell numbers also increased in untreated cultures, insulin exposure triggered the rapid proliferation of MCF-7_{NtFT4} cells (+243.3%) over a period of 48 h compared to MCF-7 (+121.8%) and MCF-7_{CG18594} cells (+57.7%; FIG. 2C).

[0112] Transcriptome analysis of MCF-7 and MCF-7_{NtFT4} cells, either starved in serum free medium or exposed to insulin, revealed 4811 differentially regulated genes (FDR<0.05) in MCF-7 cells and 4026 differentially regulated genes in MCF-7_{NtFT4} cells following insulin treatment (FIG. 3). 2023 genes were identified that were specifically deregulated in MCF-7 cells and 1238 specifically deregulated in MCF-7_{NtFT4} cells, indicating differing responses to insulin induction.

[0113] The differential gene expression in MCF-7_{NtFT4} and MCF-7 cells cultivated under starvation conditions or in the presence of insulin was also analyzed. These data support the previous assumption as 3300 (exposure to insulin) and 1794 (starved cells) genes were observed with significant differential expression (FDR<0.05) between MCF-7_{NtFT4} and MCF-7 cells. But only genes with a normalized read count >5 and a |log₂FC|>1 were included for further analysis. These genes were analyzed using STRING to identify differentially affected processes. The comparison of MCF-7_{NtFT4} and MCF-7 cells grown in medium containing insulin revealed several significantly enriched processes among the 471 deregulated genes that were included in the query. The GO terms of special interest to narrow down the function of NtFT4 in human cells were regulation of cell differentiation (84 genes deregulated in MCF-7_{NtFT4} cells, FDR=4.98×10⁻⁹), regulation of cell population proliferation (75 genes deregulated in MCF-7_{NtFT4} cells, FDR=3.62×10⁻⁷) and cell adhesion (45 genes deregulated in MCF-7_{NtFT4} cells, FDR=1.23×10⁻⁵). Many of these genes were upregulated in MCF-7_{NtFT4} cells, whereas no enriched processes were identified among the downregulated genes. In starved cells, the overall number of deregulated genes was lower (318 genes included in the query), but the GO terms regulation of cell differentiation (61 genes deregulated in MCF7_{NtFT4} cells, FDR=7.89×10⁻⁷, regulation of cell population proliferation (49 genes deregulated in MCF-7_{NtFT4} cells, FDR=1.20×10⁻⁴) and cell adhesion (32 genes deregulated in MCF-7_{NtFT4} cells, FDR=1.60×10⁻4) were again significantly enriched and also mainly found among the upregulated genes.

[0114] Significant upregulation of several genes encoding members of the integrin (ITGA6, ITGAV, ITGA2 and ITGB1), collagen (COL4A6 and COL5A1) and galectin (LGALS7B, LGALS3 and LGALS1) families revealed that cell-cell and cell-matrix interactions are affected by the expression of NtFT4. Some individual metalloprotease genes were influenced by NtFT4 (MMP13, ADAM29) but there was no major transcriptional reprogramming of the MMP or ADAM families. The comparison of insulin-exposed and starved cells revealed the upregulation of several genes in the cell cycle and small molecule metabolic process categories in both MCF-7 and MCF-7_{NtFT4} cells. In MCF-7_{NtFT4} cells, 108 of the 386 genes upregulated by insulin exposure were related to the cell cycle, compared to 76 of 478 insulin-induced genes in MCF-7 cells. These 108 genes included 48 that were specifically or more strongly upregulated in MCF-7_{NtFT4} cells. Several of these genes are involved in the DNA damage response or cell cycle signaling and regulation, whereas others play a role in the assembly of the kinetochore and centrioles or are directly involved in cytokinesis.

[0115] Taken together, these data show that the expression of NtFT4 in human cells accelerated their growth via the specific deregulation of genes linking cell adhesion (or rather cell surface signaling) with intrinsic cues controlling cell proliferation and differentiation. The growth-promoting effects of insulin were enhanced in MCF-7_{NtFT4} cells, but proliferation was also induced in the absence of this growth factor by the upregulation of genes involved in intercellular signaling and interactions with the extracellular matrix (ITGA6, ITGAV, COL5A 1, LGALS7, SPOCK1), signal transduction (TRIB2, BMP4, CASK) and transcriptional regulation (SOX9) (FIG. 4). These findings suggest two major application routes for NtFT4, namely the development of novel therapies targeting PEBPs and the utilization of plant PEBPs to improve cell growth in human cell lines used for recombinant protein production.

[0116] Example 3: Improved growth of HEK-293T cell suspension cultures expressing NtFT4. A major drawback of mammalian (particularly human) cells for heterologous protein expression is their susceptibility to loss of vigor under unfavorable conditions, resulting in poor growth. This often occurs during scale-up, because the optimal density or medium composition achieved at lower scales can be disrupted. Cells growing in suspension are also more susceptible to growth suppression due to anoikis and mechanical stress. Therefore, human HEK-293T cells were used, which can be grown as monolayers or suspension cultures, to investigate the effect of NtFT4 and CG18594 on growth and thus determine whether these proteins can improve growth and performance in a biotechnologically relevant human cell line.

[0117] HEK-293T cells were established that stably express NtFT4 or CG18594 before converting them to suspension cultures and adapting them to animal component-free Ex-CELL 293 medium. Then the viable cell density (VCD) was analyzed in different culture conditions.

[0118] HEK-293T_{CG18594} cells showed impaired growth and viability, whereas the growth of HEK-293T_{NtFT4} cells improved at all stages. Therefore, these cells were selected for further analysis (FIG. 5). The maximum VCD increased by 13.5% in serum-containing RPMI medium (from 2.15×10⁶ to 2.44×10⁶ cells/mL, FIG. 5A) and by 30.1% in the Ex-CELL 293 medium (from 2.59×10⁶ to 3.37×10⁶ cells/mL; FIG. 5B). In the latter, the VCDs of three different passages were measured to also take passage number into account. Passage number had an effect on VCDs, as shown by variations in the highest VCDs across the three passages of HEK-293T and HEK-293T_{NtFT4} cells (VCDₘₐₓ HEK-293T: 1.89×10⁶-2.50×10⁶ cells/mL; VCDₘₐₓ HEK-293T_{NtFT4} 2.31×10⁶-3.81×10⁶ cells/mL). However, the HEK-293T_{NtFT4} cells always achieved a higher VCD compared to the parallel HEK-293T cultures (VCDₘₐₓ HEK-293T_{NtFT4}+49.9%, +21.7%, and +52.6%, respectively). This increase in VCD matched the response of MCF-7_{NtFT4} cells to insulin, reflecting the presence of recombinant insulin as a major growth factor in complete ExCELL medium.

[0119] In theory, accelerated growth should lead to shorter cultivation times and higher cell densities, which should in turn achieve higher productivity in terms of protein expression. HEK-293T_{NtFT4} cells thus meet the primary criterion for an optimized expression platform. Next, the impact of NtFT4 expression on transfection efficiency was determined by monitoring transfection over 4 days using a non-secreted version of the marker protein mRFP. Multiple transfection parameters were tested (such as different reagents and DNA concentrations, durations and media) but generally observed no differences in transfection efficiency between HEK-293T_{NtFT4} and HEK-293T cells (FIG. 5C). In each case, the peak of 85% mRFP-positive cells was reached after 3 days based on our threshold gates (FIG. 9). A slightly higher frequency of mRFP-positive HEK-293T cells was observed compared to HEK-293T_{NtFT4} cells on day 1, but no difference or a slightly higher frequency in HEK-293T_{NtFT4} cells thereafter. The HEK-293T_{NtFT4} cells were also found to be more tolerant toward the transfection procedure. Using high-cell densities (20×10⁶ cells/mL) during transfection as previously recommended for Ex-CELL medium, it was possible to apply 20 μg/mL of plasmid DNA and 60 μg/mL linear polyethylenimine (PEI) without affecting the viability of HEK-293T_{NtFT4} cells (Table 1).

TABLE 1
Viability of HEK-293T_{NtFT4} cells after transfection at high cell
densities. HEK-293T_{NtFT4} cells were transiently transfected with
pcDNA3-Lifeact-mRFP and the impact of different plasmid and PEI
concentrations on cell viability and viable cell densities was
analyzed for 6 days after transfection. Viability and viable
cell density were measured using a Vi-Cell XR cell counter.

| | Viability | | VCD | |
|---|---|---|---|---|
| | 10 μg/mL | 20 μg/mL | 10 μg/mL | 20 μg/mL |
| | plasmid 30 | plasmid 60 | plasmid 30 | plasmid 60 |
| | μg/mL PEI | μg/mL PEI | μg/mL PEI | μg/mL PEI |
| Day 2 | 94.9% | 95.6% | 1.63 × 10⁶ | 1.45 × 10⁶ |
| Day 3 | 95.2% | 96.5% | 1.89 × 10⁶ | 1.82 × 10⁶ |
| Day 6 | 96.4% | 95.4% | 4.22 × 10⁶ | 3.75 × 10⁶ |

[0120] The VCD tends to decrease over time in highly-productive transient expression experiments (particularly in batch cultures) but the viability of the HEK-293T_{NtFT4} cells returned to >90% by the second day after transfection and, in contrast to HEK-293T cells, the VCD increased throughout the experiments. Recombinant protein production was quantified by expressing a human IgG1 antibody in HEK-293T and HEK-293T_{NtFT4} cells. The expression level was optimized by adapting plasmid and PEI concentrations in HEK-293T_{NtFT4} cells (FIG. 6A), and then compared the two most promising concentrations of plasmid and PEI in both cell lines and used 20 μg/mL plasmid and 60 μg/mL PEI for subsequent comparisons of the two cell lines (FIG. 6 B-D). The VCD of the HEK-293T_{NtFT4} cells again increased rapidly after transfection from 1×10⁶ to 6.36×10⁶ cells/mL (±3.25×105) after 6 days, whereas that of the HEK-293T cells increased from 1×10⁶ to 2.69×10⁶ cells/mL (±1.31×10⁵) under the same conditions (FIG. 6B). Importantly, the enhanced proliferation of HEK-293T_{NtFT4} cells did not come at the expense of lower protein yields. By day 2, the concentration of IgG1 in the HEK-293T_{NtFT4} cell medium was already 15.67% higher than in the corresponding HEK-293T cultures, and by day 5 the HEK-293T_{NtFT4} cells surpassed the HEK-293T cells by 46.75% (FIG. 6C, D). After 7 days, the secreted IgG1 concentration reached a steady state (7.51±0.07 mg/L in the HEK293T_{NtFT4} cultures, compared to 5.64±0.29 mg/L for the HEK-293T cells). By day 8, the IgG1 yield of the HEK-293T_{NtFT4} cells (7.52±0.43 mg/L) exceeded the HEK-293T cells (5.70±0.24 mg/L) by 31.95%. The HEK-293T cells never reached the level that HEK293T_{NtFT4} cells had already achieved by day 5 (6.11±0.15 mg/L). Also, the assembly of the heavy and light chains of the secreted IgG1 antibody was confirmed by immunodetection of the κ-light chain under non-reducing conditions (FIG. 6E).

[0121] The Materials and Methods show:

[0122] Experimental Design: The functionality of non-mammalian PEBPs was analysed using human breast cancer cell lines because the functions of the human proteins PEBP1 and PEBP4 have previously been characterized in detail using these models. Two PEBPs were selected each from tobacco (Nicotiana tabacum) and fruit fly (Drosophila melanogaster). The two FT-like proteins NtFT2 and NtFT4 are representative of one subclade of plant PEBPs (the other two subclades found in angiosperms are the TFL1-like and MFT-like proteins), and were selected to see whether their functional specificity would transfer to a non-plant host. Furthermore, two poorly-characterized fruit fly PEBPs were also selected (CG18594 and CG10298) which are similar to human PEBP1. Analysis of cell line growth and exposure to apoptosis-inducing agents led us to focus on NtFT4 and CG18594, the two PEBPs with the strongest and most consistent effects in the human cells. HEK-293T rather than HEK-293 or either of the commercially used HEK-293 derivatives were selected because the former is a major model cell line for biomedical research and is also used as an expression platform for recombinant proteins and viral particles.

[0123] Reagents, plasmids and cloning: Reagents were purchased from Thermo Fisher Scientific or Sigma-Aldrich if not otherwise stated. Incubations were carried out at room temperature if no temperature is specified. Primers used for cloningTo create stable cell lines expressing different PEBPs, the Genome-TALER human AAVS1 safe harbor gene knock-in kit (GeneCopoeia) was used. For stable transfection of MCF-7, MDA-MB231 and HEK-239T cells with PEBP1, PEBP4, NtFT2, NtFT4, CG18594 and CG10298 constructs, the coding sequces were amplified by PCR using primers with attached restriction sites and were transferred to vector DC-DON-SH1 by restriction and ligation. For the immunoprecipitation of PEBPs, the codon-optimized NtFT4 coding sequence was cloned in frame with HA-EGFP and transferred to vector pcDNA3 by amplifying each segment, digesting the products with restriction enzymes SpeI/XhoI (HA-EGFP), XhoI/ApaI (NtFT4) and SpeI/ApaI (pcDNA3) and ligating them (all restriction enzymes were from New England Biolabs). Vectors pcDNA3-HA-EGFP-CG18594 or pcDNA3-HA-EGFP-NtFT4 and pcDNA3-myc-mFRP-H2AZ were used for colocalization studies, and were prepared by restriction ligation using XhoI/XbaI. The vector pcDNA3-LifeAct-mRFP was used to measure transfection efficiency in the stable cell lines already expressing cytoplasmic GFP. Therefore, the coding sequences for LifeAct (Ibidi) and mRFP were attached by PCR and transferred the product to pcDNA3 using KpnI/XbaI. All plasmids were verified by sequencing. Vector pAPT-1E4-IgG1, encoding a human IgG1 with a κ light chain, was a kind gift from Dr. Nicole Raven (Fraunhofer IME, Aachen, Germany).

[0124] Cell Culture: Adherent MCF-7, MDA-MB231 and HEK-293T cells were grown in RPMI-1640 GlutaMAX medium with 5% fetal calf serum (FCS) and a 1% antibiotic-antimycotic mix in six-well plates for transfection and in T25 and T75 flasks. HEK-293T cells and their derivatives were converted to shaking suspension cultures either in complete RPMI-1640 medium by reducing the serum to 1% in steps or by immediate transfer to Ex-CELL-293 medium with 10 mM HEPES and 6 mM L-glutamine. Suspension cultures were incubated on an orbital shaker at 110 rpm in a 5% CO₂ atmosphere at 37° C. with a relative humidity of ˜93%. The cells were cultivated in 250-mL Erlenmeyer flasks containing 40 mL medium or in 500-mL Optimum Growth flasks (Thomson) containing 250 mL medium.

[0125] Establishing stable cell lines: Cells were transferred to six-well plates in Opti-MEM for transfections using Lipofectamine 3000 (Thermo Fisher Scientific) according to the manufacturer's protocol. DC-DON plasmids with the expression cassette for different PEBPs were co-transfected with the two TALEN plasmids targeting the AAVS1 safe harbor locus (GeneCopoeia). Successful transfection was verified by fluorescence microscopy to detect expression of the integrated selection marker GFP 2A puromycin. Subsequently, positive cells were selected in complete medium containing 1 μg/mL puromycin dihydrochloride. Stable clonal lines were established by limiting dilution in 96-well plates followed by the selection of colonies grown from single cells. Established MCF-7, MDA-MB231 (FIG. 10) and HEK-293T cells expressing different PEBPs were named according to the convention MCF-7_{PEBP}, MDA-MB231_{PEBP} and HEK-293T_{PEBP} (where ‘PEBP’ refers to the lines collectively or is replaced by the name of a specific protein).

[0126] Verification of single-gene integration and gene expression: RNA was isolated from each established line using the NucleoSpin RNA kit (MachereyNagel) followed by reverse transcription using PrimeScript RT master mix (Takara) and sqRT-PCR with gene-specific and GAPDH primers. To confirm gene integration, genomic DNA from each cell line was isolated using the NuceloSpin tissue kit for genomic DNA purification (Macherey-Nagel) and specific knock-in was verified by PCR using the primer mixes for the 5′ and 3′ junction regions (GeneCopoeia).

[0127] Apoptosis assay: MCF-7_{PEBP} and MDA-MB231_{PEBP} cell lines (PEBP1, PEBP4, NtFT2, NtFT4, CG18594 and CG1o298) were seeded at a density of 2.5×10⁵ cells/mL in six-well plates. After 24 h the cells were starved for another 24 h by replacing the medium with RPMI plus 1% antibiotic-antimycotic mix but without FCS. Apoptosis was induced by adding 500 nM staurosporine or 10 ng/mL TNFα (100 ng/mL was used for the MDA-MB231 cells) for 24 h. Cells were then harvested with a cell scraper, washed with PBS, filtered through a 35-μm cell strainer (Falcon, Corning) and stained with 7-amino-actinomycin (7-AAD) and Annexin V-BV421 (BD Biosciences) in Annexin V binding buffer (0.01 M HEPES/NaOH (pH 7.4), 0.14 M NaCl, 2.5 M CaCl₂). A FACSCelesta (BD Biosciences) was used for subsequent analysis with the following parameters: 7-AAD excitation=561 nm, detection=670/30 nm; Annexin V-BV421 excitation=405 nm, detection=450/40 nm. Gating and assignment of populations was carried out as shown in FIG. S2. Data were quantified using FACSDiva v8.0.1.1 (BD Biosciences). Populations containing distinguishable late apoptotic and dead cells (7-AAD and Annexin-V positive) were compared.

[0128] Proliferation assay: Cells were not uniform in their ability to settle after seeding so several methods to analyze the proliferation of adherent MCF-7PEBP and MDA-MB231_{PEBP} cell lines (PEBP1, PEBP4, NtFT2, NtFT4, CG18594, CG10298) have been used. First, cells were counted for 4 days after seeding 3×10⁵ cells in three replicates for each time point into T25 flasks in complete medium. At each time point, the cells were harvested, carefully resuspended in 1 mL complete medium and counted using a Vi-Cell XR cell counter (Beckmann Coulter). Using the initial seeding density and the density after 4 days, average doubling times for each replicate were calculated. Cells were also seeded at 500 or 1000 cells per well into 384-well plates (16 wells per cell line, three replicates) and confluency was monitored every 2 h for 48 h using the IncuCyte ZOOM system (Sartorius) allowing doubling times to be calculated. Finally, cell proliferation was measured incorporating 5-bromo-2′deoxyuridine (BrdU). 20,000 cells were seeded into eight-well chamber slides in complete RPMI-1640 medium, added 50 μL 0.3 mg/mL BrdU after 24 h and incubated for 2 h. The cells were then fixed with ice-cold ethanol (70%), treated with 1.5 M HCl and blocked with PBS containing 5% (v/v) FBS with intermediate washing steps in PBS. The cells were incubated with anti-BrdU-Alexa Fluor 488 at 4° C. overnight. For microscopy, cells were washed with PBS+5% (v/v) FBS, nuclei were counterstained with 4′,6-diamidino2-phenylindole (DAPI) and the cells were mounted with anti-fade. BrdU-labeled cells were counted under a DMi8 fluorescence microscope (Leica Microsystems) at six random positions containing at least 300 cells to ensure comparable confluency. To analyze the growth response to insulin, 5×10⁵ MCF-7_{PEBP} cells (NtFT4 and CG18594) were seeded in complete medium in T-25 flasks. After settling, the cells were starved for 24 h in serum-free medium before adding 40 μg/mL recombinant human insulin. After 48 h the cells were harvested and counted using a Vi-CELL XR cell counter.

[0129] Migration assay: The MCF-7_{PEBP} cell lines (NtFT4 and CG18594) were seeded (1×10⁵ cells in 100 μL serum-free medium) in 24-transwell Boyden chambers with a pore size of 8 μm (Corning) and complete medium in the lower chamber, and were incubated for 24 h. Medium was then removed from the upper chamber and the non-migrated cells were carefully removed using a cotton swab. The inlet was transferred to a new 24-well chamber containing 4% (w/v) formaldehyde for 30 min at 4° C. After drying, fixed cells were stained in a 0.1% (w/v) crystal violet for 5 min and washed with water. Random images of migrated cells were captured using a MZ 16 F fluorescence stereomicroscope (Leica Microsystems) and counted using ImageJ v1.501.

[0130] Immunofluorescence: MCF-7 and MCF-7_{CG18594} cells were fixed with 4% formaldehyde for 30 min at 4° C., washed three times with PBS and blocked for 60 min with blocking solution (PBS, 5% FBS, 0.3% Triton X-100) before incubating overnight at 4° C. with Anti-E-cadherin (24E10) (Cell Signaling; #3195) in PBS containing 1% BSA and 0.3% Triton X-100. Cells were then washed three times with PBS and incubated with anti-rabbit IgG-Alexa Fluor 546 for 2 h in the dark. Cells were analyzed by fluorescence microscopy using a DMi8 inverted microscope (Leica Microsystems) and fluorescence intensities in linear regions of interest were measured using LAS X software (Leica Microsystems).

[0131] Live cell imaging for subcellular localization: Localization studies using the pcDNA3 vectors containing constructs HA-EGFP, HA-EGFP-NtFT4, HA-EGFP-CG18594 and myc-mRFP-H2AZ were carried out by co-transfecting HEK-293T cells with EGFP plasmids and pcDNA3-myc-mRFP-H2AZ using Lipofectamine 3000. Cells were transiently transfected in six-well plates in Opti-MEM medium and fluorescence was imaged in living cells 24 h post-transfection using a TCS SP5 X laser scanning microscope (Leica Microsystems).

[0132] Protein extraction, analysis and western blotting: Adherent cells were harvested with a cell scraper, washed with cold PBS, and proteins were extracted using 300 μL cold RIPA lysis buffer (25 mM Tris-HCl pH 7.6, 150 mM NaCl, 1% NP-40, 1% sodium deoxycholate, 0.1% SDS containing protease and phosphatase inhibitor cocktails) for 30 min on ice with occasional shaking. Protein concentrations in the extract supernatant were measured using the Pierce Coomassie Plus Protein Assay (Thermo Fisher Scientific) according to the manufacturer's specifications. Proteins were separated by SDS-PAGE and stained using the PAGE Blue protein staining kit or transferred to a 0.02-μm nitrocellulose membrane using the wet Mini Trans-Blot Cell system (Bio-Rad Laboratories). Western blots were probed with the following antibodies: E-cadherin mAb rabbit 24E10 (Cell Signaling, #3195); GAPDH Di6H11 rabbit mAb (Cell Signaling, #5174); IGF-I receptor β D23H3 rabbit mAb (Cell Signaling, #9750); phospho-Akt (Ser473, D9E) rabbit mAb (Cell Signaling, #4060); phospho-mTOR (Ser2448, D9C2) rabbit mAb (Cell Signaling, #5536); HA tag rabbit pAb (MBL, #561); human IgG (H+L) alkaline phosphatase (AP) (Thermo Fisher Scientific, #62-8422). Primary antibodies were detected using either anti-rabbit IgG sAb AP and SigmaFast BCIP/NBT tablets or anti-rabbit IgG sAb horseradish peroxidase and the SuperSignal West dura kit, and the signals were detected using a G:Box Chemi (Syngene). Brightness and contrast were optimized using Adobe Photoshop CS6 v13.0.1 ×64 (Adobe Systems).

[0133] Quantitative PCR: Gene expression was analyzed by quantitative real-time PCR using Kapa SYBR Fast qPCR Master Mix and the CFX96 Real-Time System (Bio-Rad). Each reaction was carried out in technical triplicates and the primer sequences are provided in Table 2 Specificity was ensured by melt curve analysis and the sequencing of PCR products, and by including no-template and no-reverse-transcription controls. Individual PCR efficiency was determined using LinReg PCR v2017.0 and relative gene expression levels were normalized to GAPDH following the initial testing of GAPDH, ACTB, GUSB and MRPL32.

TABLE 2
Oligonucleotide Sequences used in context of the invention

| Name | Sequence 5′ to 3′ | Purpose |
|---|---|---|
| PEBP1 for XbaI | aaatctagaATGCCGGTGGACCTCAGC | cloning of |
| PEBP1 rev AscI | agaggcgcgccCTACTTCCCAGACAGCTGCTCG | donor |
| PEBP4 for XbaI | aaatctagaATGGGTTGGACAATGAGGC | plasmids |
| PEBP4 rev AscI | agaggcgcgccCTAGCAGGCAGCTATCTCCG | into |
| NtFT2 for XbaI | aaatctagaATGTTAAGAGCAAATCCTTTAG | DC-DON- |
| NtFT2 rev AscI | agaggcgcgccTTATAGGTGACGGCCACC | SH1 |
| NtFT4 for XbaI | aaatctagaATGCCAAGAATAGATCCTTTG | backbone |
| NtFT4 rev AscI | agaggcgcgccTTAATATGCGCGGCGG | |
| CG18594 for XbaI | aaatctagaATGGACACCGCCGGCATTAT | |
| CG18594 rev AscI | agaggcgcgccTTACTGGACCGTCTCGATGAGG | |
| CG10298 for XbaI | aaatctagaATGTCCGATTCCACCGTG | |
| CG10298 rev AscI | agaggcgcgccCTACTTCTTGCCAGATAGTTGC | |
| HA-EGFP for SpeI | aaaactagtatatacccctacaatatccctaac | cloning of |
| | tacactATGGTGAGCAAGGGC | pcDNA3- |
| EGFP rev XbaI | aaaatctagaTTACTTGTACAGCTCGTCCATG | HA-EGFP |
| EGFP-rev XhoI | aaaatctagaCTTGTACAGCTCGTCCATG | cloning of |
| NtFT4 for XhoI | aaactgagATGCCAAGAATAGATCCTTTG | pcDNA3- |
| NtFT4 rev ApaI | aaagggcccTTAATATGCGCGGCGG | HA-EGFP- |
| LifeAct-mRFP for | acaggtaccatgggcgtggccgacctgatcaag | NtFT4 |
| KpnI | aagttcgagagcatcagcaaggaagagggcgac | |
| | ccaccggtcgccaccATGGCCTCCTCCGAG | |
| mRFP rev XbaI | aaatctagaTTAGGCGCCGGTGGA | |
| DC-DON-SH1 seq | CGGTGGGAGGTCTATATAAGCAG | sequencing |
| for | | |
| DC-DON-SH1 seq | GACAGTGGGAGTGGCACCTTC | |
| rev | | |
| CMV for | CGCAAATGGGCGGTAGGCGTG | |
| T7 for | TAATACGACTCACTATAGGGAGA | |
| bGH rev | TAGAAGGCACAGTCGAGG | |
| 5’ Junction PCR | CCGGAACTCTGCCCTCTAAC | verification |
| Primer for | | of genomic |
| | | integration |
| 5’ Junction PCR | CCCGTGAGTCAAACCGCTAT | into the |
| Primer rev | | aavs1 safe |
| 3’ Junction PCR | AGCTATCTGGTCTCCCTTCC | harbor |
| Primer for | | locus |
| 3’ Junction PCR | TCCTGGGATACCCCGAAGAG | |
| Primer rev | | |
| GFP for | ATCGAGAAGTACGAGGACG | transgene |
| GFP rev | CACCACGAAGCTGTAGTAGC | expression - |
| | | reference |
| | | gene |
| PEBP1 for | AGACCCACCAGCATTTCGTG | transgene |
| PEBP1 rev | GGTGGTCTCCAGATCGGTTG | expression - |
| PEBP4 for | TCCTGGATGGAGCCGATAGT | PEBP |
| PEBP4 rev | AACTGGTAGCGATGGAAGCC | expression |
| NtFT2 for | AGATATCCCTGCAACCACAGAAGCAAC | |
| NtFT2 rev | AAACAGCGGCAACAGGCAAATTGAGAC | |
| NtFT4 for | GATATCCCAGCAACTACAGATACAAG | |
| NtFT4 rev | GAAACGGGCAAACCAAGATTGTAAAC | |
| CG18594 for | CCACCATCACCTATCCTTCC | |
| CG18594 rev | GAACTTCTCGGTGGTGATCT | |
| CG10298 for | AGCCAGCCAAAGGTGAAA | |
| CG10198 rev | GGACCTGCACCCACATATT | |
| GAPDH for | CTCTGCTCCTCCTGTTCGAC | gene |
| GAPDH rev | TTCCCGTTCTCAGCCTTGAC | expression - |
| β-ACTIN for | CACAGAGCCTCGCCTTTGC | reference |
| β-ACTIN rev | AATCCTTCTGACCCATGCCC | gene |
| RpL32 for | GGTTACGACCCATCAGCCC | |
| RpL32 rev | TCAATGCCTCTGGGTTTCCG | |
| GUSB for | GCTCCGAATCACTATCGCCA | |
| GUSB rev | CGCACTTCCAACTTGAACAGG | |
| CDH1 for | TTCTGCTGATCCTGTCTGAT | gene |
| CDH1 rev | AGGTGGTCACTTGGTCTTTA | expression - |
| CTNNB1 for | AAGGAGCTAAAATGGCAGTG | epithelial |
| CTNNB1 rev | TCCTAAAGCTTGCATTCCAC | markers |
| KRT18 for | TGACACCAATATCACACGAC | |
| KRT18 rev | TCAATCTGCTGAGACCAGTA | |
| KRT19 for | CACTACTACACGACCATCCA | |
| KRT19 rev | CTCAGCGTACTGATTTCCTC | |
| CDH2 for | ATGTGCCGGATAGCGG | gene |
| CDH2 rev | GGCTCACTGCTCTCATATTG | expression - |
| SNAI1 rev | CTTGACATCTGAGTGGGTCTG | mesenchymal |
| SNAIl for | CTCGAAAGGCCTTCAACTG | markers |
| SNAI2 for | ATTCGGACCCACACATTAC | |
| SNAI2 rev | CAGAATGGGTCTGCAGAT | |
| VIM for | AGGAGGAGATGCTTCAGAGA | |
| VIM rev | AGCTCCTGGATTTCCTCTTC | |
| AKT1 for | GACCATGAACGAGTTTGAGT | gene |
| AKT1 rev | CGTACTCCATGACAAAGCAG | expression - |
| BCL2 for | GAACTGGGGGAGGATTGTG | cell |
| BCL2 rev | AGAAATCAAACAGAGGCCG | survival |
| BIRC5 for | CGACCCCATAGAGGAACATA | |
| BIRC5 rev | CTAAGACATTGCTAAGGGGC | |
| JUN for | ACTGCAAAGATGGAAACGAC | |
| JUN rev | TGCTCATCTGTCACGTTCT | |
| MAPK8 for | GAGCTCATGGATGCAAATCT | |
| MAPK8 rev | AGGCGTCATCATAAAACTCG | |
| MYCfor | GAGACAGATCAGCAACAACC | |
| MYC rev | TTTCAACTGTTCTCGTCGTT | |
| BRCA1 for | CCAGAACAAAGCACATCAGA | gene |
| BRCA1 rev | ATGTTTCCGTCAAATCGTGT | expression - |
| BRCA2 for | TACATGAACAAATGGGCAGG | proliferation |
| BRCA2 rev | ATTTCTGCCTTTTGGCTAGG | |
| CCND1 for | TCGGTGTCCTACTTCAAATG | |
| CCND1 rev | ATGGAGTTGTCGGTGTAGAT | |
| CDKN1A for | CACTGTCTTGTACCCTTGTGC | |
| CDKN1A rev | AAAATGCCCAGCACTCTTAG | |
| CDKN2A for | GAGGGCTTCCTGGACAC | |
| CDKN2A rev | TCAATCGGGGATGTCTGAG | |
| ID1 for | GAATCATGAAAGTCGCCAGT | |
| ID1 rev | TGAAGGTCCCTGATGTAGTC | |
| PTEN for | CAAGATATACAATCTTTGTGCTGA | |
| PTEN rev | TGGTCCTTACTTCCCCATAG | |

[0134] Immunoprecipitation: HEK-293T cells were seeded in six-well plates and transfected with pcDNA3-HA-EGFP-NtFT4 and pcDNA3-HA-EGFP using Lipofectamine 3000. Immunoprecipitation was carried out using the Pierce Magnetic IP/Co-IP kit (Thermo Fisher Scientific) according to the manufacturer's specifications. Success was confirmed by silver staining of the eluate and input proteins using the Pierce Silver Stain for Mass Spectrometry (Thermo Fisher Scientific) according to the manufacturer's specifications, and by western blot.

[0135] LC-MS analysis: Immunoprecipitated proteins were reduced in 5 mM DTT for 30 min and alkylated with 14 mM chloracetamide for 30 min. Samples were digested with trypsin at 37° C. overnight. The digest was quenched with 1% formic acid and the peptides desalted with C18 stage tips prior to MS analysis. Dried peptides were redissolved in 2% acetonitrile supplemented with 0.1% trifluoroacetic acid (TFA) for analysis. Samples (0.5 μg) were analyzed using an EASY-nLC 1200 coupled to a Q Exactive HF mass spectrometer (Thermo Fisher Scientific). Peptides were separated on 20-cm frit-less silica emitters (New Objective, 0.75 μm inner diameter) packed in-house with reversed-phase ReproSil-Pur C18 AQ 1.9 μm resin (Dr. Maisch). The column was kept at 50° C. in a column oven throughout the run. Peptides were eluted for 115 min using a segmented linear gradient of 0-98% solvent B (solvent A=0.5% formic acid in water; solvent B=80% acetonitrile, 19.5% water and 0.5% formic acid) at a flowrate of 300 nL/min. Mass spectra were acquired in datadependent acquisition mode using a Top12 method in the Orbitrap analyzer with a mass range of 300-1759 m/z at a resolution of 120,000 FWHM, maximum IT of 55 ms, and a target value of 3×10⁶ ions. Precursors were selected with an isolation window of 1.2 m/z. HCD fragmentation was performed at a normalized collision energy of 25. MS/MS spectra were acquired with a target value of 5×10⁴ ions at a resolution of 15,000 FWHM, maximum IT of 150 ms and a fixed first mass of 100 m/z. Peptides with a charge of +1, >6, or with unassigned charge state were excluded from fragmentation for MS², and dynamic exclusion for 30 s prevented repeated selection of precursors. Raw data were processed using MaxQuant software v1.6.3.4 MS/MS spectra were searched with the Andromeda search engine against the human UniProt database (15 May 2019) and were supplemented with sequences of the corresponding protein constructs of interest. Sequences of 248 common contaminant proteins and decoy sequences were automatically added during the search. Trypsin specificity was required and a maximum of two missed cleavages was allowed. Minimal peptide length was set to seven amino acids. Carbamidomethylation of cysteine residues was set as a fixed modification, whereas oxidation of methionine and protein N-terminal acetylation were set as variable modifications. MaxLFQ with ratio count 1 was enabled. Peptide-spectrum matches and proteins were retained if they were below a false discovery rate of 1%. Match between runs was enabled. Data were analyzed in R v3.5.3 combined with RStudio v1.1.463. The LFQ intensities were log₂ transformed and reverse and contaminant hits removed. LIMMA v3.40.2 was used for differential expression analysis based on those values.

[0136] Mace Analysis: MCF-7 and MCF-7_{NtFT4} cells were treated with 40 μg/mL insulin in serum-free medium for 24 h. Cells were harvested and RNA was isolated using the NucleoSpin RNA kit (Macherey-Nagel). The isolated RNA was digested with TURBO DNase and analyzed by agarose gel electrophoresis. Massive Analysis of cDNA Ends (MACE), including sample processing, quality control, sequencing with 1×10⁶ raw reads per sample and data analysis, was carried out by GenXPro. The average raw count of each gene within a library was divided by the geometric mean of all counts in all samples and the median of the quotients was calculated per library. Each raw count was then divided by the libraryspecific median value. FDR values were calculated according to Benjamini-Hochberg, and p-values were calculated using the DEseq R package. For downstream data analysis, thresholds for genes included in differential gene expression and GO enrichment analysis between starved and insulin-exposed cells and between the two cell lines were set to a FDR <0.05 and a normalized count >0.1. For GO enrichment analysis, the PANTHER classification system was used. Interaction networks were analyzed using STRING v11 (62) and only genes with a log₂ fold change >1 or <−1, p<0.001, and a mean value of normalized reads between the two samples >5 were included.

[0137] Transfection of suspension cultures: For transfection, HEK-293T and HEK-293T_{NtFT4} cells were collected from 40 mL cultures and resuspended in 2 mL complete Ex-CELL 293 medium at a density of 2×10⁷ cells/mL in six-well plates (42). Transfection efficiency was tested using 10-30 μg/mL DNA and 30-90 μg/mL 25 kDa linear polyethylenimine (PEI, Polysciences). Plasmid DNA was added to the cells followed by PEI, and cells were incubated for 4 h before dilution to 1×10⁶ cells/mL in 40 mL complete medium. Transfection efficiency was determined by measuring the expression of pcDNA3-LifeAct-mRFP in single cells using a FACSCelesta device (BD Biosciences) after 24, 48, 72 and 96 h (excitation=561 nm, detection=610/20 nm). Protein yields after transient transfection were determined by transfecting cells with pAPT-1E4-IgG1 and collecting secreted protein from the medium supernatants for up to 10 days. The expression of 1E4-IgG1 was measured by enzyme-linked immunosorbent assay (ELISA) or by western blotting using anti-human κ light chain IgGAP and bevacizumab/Avastin (kindly provided by Dr. Nicole Raven) as a control. Assembly of the antibody heavy and light chains was confirmed by electrophoresis using reducing and non-reducing loading buffers.

[0138] DAS-ELISA: For the quantification of human IgG1, 96-well plates were coated with anti-human IgG, Fc specific (Sigma-Aldrich, #I2136) in 50 mM carbonate buffer (pH 9.6) overnight at 4° C. The following steps include intermediate washes with PBS+0.1% Tween-20. Wells were blocked with PBS containing 5% nonfat milk for 1 h before diluted samples and standards (Avastin) were loaded and incubated for 2 h. The antibody was detected by incubation for 2 h with an anti-human kappa light chain-peroxidase secondary antibody (Sigma-Aldrich, #A7164) in blocking buffer, and subsequent staining with 3,3′, 5,5′-tetramethylbenzidine (TMB). The staining reaction was stopped with 1 M HCl and adsorption was measured at 450 nm using an Infinite 200 Pro plate reader (Tecan). All experiments were carried out as technical triplicates.

[0139] Statistical analysis: All boxplots in the figures were prepared using the default settings of OriginPro2020 (center line=median; box limits=upper and lower quartiles; whiskers=1.5×interquartile range; points=outliers). Statistical analysis, if not stated otherwise, was carried out using OriginPro2020 v9.7.5.184 (OriginLab). Equality of variances was analyzed by one-way ANOVA and Levene's test, and pairwise comparisons were carried out using Welch's t-test. FDRs (MACE and LC-MS/MS analysis) were calculated according to Benjamini-Hochberg.

1. A recombinant vertebrate cell, comprising (i) a nucleic acid sequence encoding for a non-vertebrate and/or artificial phosphatidylethanolamine-binding protein (PEBP) and/or (ii) a protein consisting of an amino acid sequence of the non-vertebrate and/or artificial phosphatidylethanolamine-binding protein (PEBP).

2. The recombinant vertebrate cell of claim 1, wherein the vertebrate cell is a mammalian cell, such as a human cell, a mouse cell or a hamster cell.

3. The recombinant vertebrate cell of claim 1, wherein the non-vertebrate and/or artificial PEBP is a plant- or insect PEBP.

4. The recombinant vertebrate cell of claim 1, wherein the non-vertebrate and/or artificial PEBP consists of an amino acid sequence that when aligned with the sequence of SEQ ID NO: 623 (human PEBP1) does not comprise the most C terminal alpha helix, preferably does not comprise the sequence of amino acids 177 to 187 of SEQ ID NO: 623, nor a sequence that is 90% identical to such a sequence.

5. The recombinant vertebrate cell of claim 1, wherein the non-vertebrate and/or artificial PEBP is a protein that is heterologous to the species of the vertebrate cell, and/or wherein the nucleic acid sequence is for a heterologous expression of the non-vertebrate and/or artificial PEBP.

6. The recombinant vertebrate cell of claim 1, wherein the vertebrate cell expressing the non-vertebrate and/or artificial PEBP compared to the same vertebrate cell not expressing the non-vertebrate and/or artificial PEBP has a significantly increased vitality, growth and/or proliferation.

7. The recombinant vertebrate cell of claim 1, wherein the non-vertebrate and/or artificial PEBP comprises, and preferably consists of, an amino acid sequence having at least 80% sequence identity to a sequence shown in SEQ ID NO: 820 (CG10298), SEQ ID NO: 821 (CG18594) or SEQ ID NO: 1 (NtFT4).

8. A method producing a cell line with improved characteristics selected from cell vitality, cellular protein expression and cell growth, the method comprising the steps of providing a candidate vertebrate cell of a selected vertebrate species, introducing into the vertebrate cell a non-vertebrate and/or artificial phosphatidylethanolamine-binding protein (PEBP) to obtain a cell with improved characteristics, and culturing the cell with improved characteristics to obtain the cell line with improved characteristic.

9. The method of claim 8, further comprising a step of selection of one cell clone with improved characteristics, and subsequence culturing to obtain a clonal cell-line with improved characteristic.

10. The method of claim 8, wherein the candidate vertebrate cell is a mammalian cell such as a human cell, a mouse cell or a hamster cell.

11. The method of claim 8, wherein the non-vertebrate and/or artificial PEBP consists of an amino acid sequence that when aligned with the sequence of SEQ ID NO: 623 (human PEBP1) does not comprise the most C terminal alpha helix, preferably does not comprise the sequence of amino acids 177 to 187 of SEQ ID NO: 623, nor a sequence that is 90% identical to such a sequence.

12. An isolated nucleic acid construct suitable for recombinant expression in a vertebrate cell or cell line, comprising a coding element operatively linked with one or more expression elements which is suitable for regulating protein expression in the vertebrate cell, wherein the coding element comprises a nucleic acid sequence encoding a non-vertebrate and/or artificial phosphatidylethanolamine-binding protein (PEBP).

13. The isolated nucleic acid construct of claim 12, suitable for transient or stable transfection of the vertebrate cell.

14. A recombinant vertebrate cell comprising the nucleic acid construct of claim 12.

15. A method for recombinant expression of a target protein, comprising a step of culturing under suitable conditions a recombinant vertebrate cell of claim 1 or a cell line with improved characteristics of claim 1, wherein the recombinant vertebrate cell or cell line with improved characteristics further comprises an expression construct encoding the target protein.

The application's sequence listing, which the Patent Office published only in electronic form, follows.

SEQUENCE LISTING (1370 sequences)

SEQ ID NO: 1 - protein, 174 aa, Nicotiana tabacum
MPRIDPLIVGRVVGDVLDPFTRSVDLRVVYNNREVNNACGLKPSQIVTQPRVQIGGDDLRNFYTLVMVDPDAPSPSNPNLREYLHWLVTDIPATTDTSFGNEVICYENPQPSLGIHRFVFVLFRQLGRETVYAPGWRQNFSTRDFAEVYNLGLPVSAVYFNCHRESGTGGRRAY

SEQ ID NO: 2 - protein, 177 aa, Nicotiana tabacum
MPREREPLVVGRVIGDVLDPFTRSIGLGVIYRDREVNNGCELRPSQVINQPRVEVGGDDLRTFYTLVMVDPDAPSPSDPNLREYLHWLVTDIPATTGASFGQEIVCYESPRPTMGIHRFVFVLFRQLGRQTVYAPGWRQNFNTKDFAELYNLGLPVAAVYFNCQRESGSGGRRRSAD

SEQ ID NO: 3 - protein, 175 aa, Arabidopsis halleri subsp. gemmifera
MSINIRDPLIVSRVVGDILDPFNRSISLRVTYGQREVTNGLDLRPSQVQNKPRVEIGGEDLRNFYTLVMVDPDVPSPSNPHLREYLHWLVTDIPATTGTTFGNEIVCYENPSPTAGIHRIVLILFRQLGRQTVYAPGWRQNFNTREFAEIYNLGLPVAAVFYNCQRESGCGGRRI

SEQ ID NO: 4 - protein, 175 aa, Arabidopsis halleri subsp. gemmifera
MSINIRDPLIVSRVVGDILDPFNRSISLRVTYGQREVTNGLDLRPSQVQNKPRVEIGGEDLRNFYTLVMVDPDVPSPSNPHLREYLHWLVTDIPATTGTTFGNEIVCYENPSPTAGIHRIVSILFRQLGRQTVYAPGWRQNFNTREFAEIYNLGLPVAAVFYNCQRESGCGGRRI

SEQ ID NO: 5 - protein, 175 aa, Arabidopsis lyrata subsp. lyrata
MSLSRRDPLVVGSVVGDVLDPFTRLVSLRVTYGQREVTNGLDLRPSQVLNKPTVDIGGDDFRNFYTLVMVDPDVPSPSNPHLREYLHWLVTDIPATTGTSFGNEVVCYESPRPPSGIHRIVLVLFRQLGRQTVYAPGWRQQFNTREFAEIYNLGLPVAASFFNCQRENGCGGRRT

SEQ ID NO: 6 - protein, 175 aa, Arabidopsis lyrata subsp. lyrata
MSINIRDPLIVSRVVGDILDPFNRSISLRVTYGQREVTNGLDLRPSQVQNKPRVEIGGEDLRNFYTLVMVDPDVPSPSNPHLREYLHWLVTDIPATTGTTFGNEIVCYENPSPTAGIHRIVVILFRQLGRQTVYAPGWRQNFNTREFAEIYNLGLPVAAVFYNCQRESGCGGRRI

SEQ ID NO: 7 - protein, 175 aa, Arabidopsis lyrata subsp. petraea
MSIYIRDPLIVSRVVGDILDPFNRSISLRVTYGQREVTNGLDLRPSQVQNKPRVEIGGEDLRNFYTLVMVDPDVPSPSNPHHREYLHWLVTDIPATTGTTFGNEIVCYENPSPTAGIHRIVVILFRQLGRQTVYAPGWRQNFNTREFAEIYNLGLPVAAVFYNCQRESGCGGRRI

SEQ ID NO: 8 - protein, 175 aa, Arabidopsis lyrata subsp. petraea
MSIYIRDPLIVSRVVGDILDPFNRSISLRVTYGQREVTNGLDLRPSQVQNKPRVEIGGEDLRNFYTLVMVDPDVPSPSNPHHREYLHWLVTDIPATTGTTYGNEIVCYENPSPTAGIHRIVVILFRQLGRQTVYAPGWRQNFNTREFAEIYNLGLPVAAVFYNCQRESGCGGRRI

SEQ ID NO: 9 - protein, 175 aa, Arabidopsis lyrata subsp. petraea
MSINIREPLIVSRVVGDILDPFNRSISLRVTYGQREVTNGLDLRPSQVQNKPRVEIGGEDLRNFYTLVMVDPDVPSPSNPHLREYLHWLVTDIPATTGTTFGNEIVCYENPSPTAGIHRIVLILFRQLGRQTVYAPGWRQNFNTRDFAEIYNLGLPVAAVFYNCQRESGCGGRRI

SEQ ID NO: 10 - protein, 175 aa, Arabidopsis thaliana
MSLSRRDPLVVGSVVGDVLDPFTRLVSLKVTYGHREVTNGLDLRPSQVLNKPIVEIGGDDFRNFYTLVMVDPDVPSPSNPHQREYLHWLVTDIPATTGNAFGNEVVCYESPRPPSGIHRIVLVLFRQLGRQTVYAPGWRQQFNTREFAEIYNLGLPVAASYFNCQRENGCGGRRT

SEQ ID NO: 11 - protein, 175 aa, Arabidopsis thaliana
MSLSRRDPLVVGSVVGDVLDPFTRLVSLKVTYGHREVTNGLDLRPSQVLNKPIVEIGGDDFRNFYTLVMVDPDVPSPSNRHQREYLHWLVTDIPATTGNAFGNEVVCYESPRPPSGIHRIVLVLFRQLGRQTVYAPGWRQQFNTREFAEIYNLGLPVAASYFNCQRENGCGGRRT

SEQ ID NO: 12 - protein, 219 aa, Arabidopsis thaliana
MQIRNSINMCRGFMPMIQIKEAETKTSKTETINTEKPPVCSRSKMSINIRDPLIVSRVVGDVLDPFNRSITLKVTYGQREVTNGLDLRPSQVQNKPRVEIGGEDLRNFYTLVMVDPDVPSPSNPHLREYLHWLVTDIPATTGTTFGNEIVCYENPSPTAGIHRVVFILFRQLGRQTVYAPGWRQNFNTREFAEIYNLGLPVAAVFYNCQRESGCGGRRL

SEQ ID NO: 13 - protein, 175 aa, Arabidopsis thaliana
MSINIRDPLIVSRVVGDVLDPFNRSITLKVTYGQREVTNGLDLRPSQVQNKPRVEIGGEDLRNFYTLVMVDPDVPSPSNPHLREYLHWLVTDIPATTGTTFGNEIVCYENPSPTAGIHRVVFILFRQLGRQTVYAPGWRQNFNTREFAEIYNLGLPVAAVFYNCQRESGCGGRRL

SEQ ID NO: 14 - protein, 171 aa, Arabidopsis thaliana
GSHMSINIRDPLIVSRVVGDVLDPFNRSITLKVTYGQREVTNGLNLRPSQVQNKPRVEIGGEDLRNFYTLVMVDPDVPSPSNPHLREYLHWLVTDIPATTGTTFGNEIVSYENPSPTAGIHRVVFILFRQLGRQTVYAPGWRQNFNTREFAEIYNLGLPVAAVFYNSQRES

SEQ ID NO: 15 - protein, 175 aa, Arabis alpina
MSISPRDPLVVGGVVGDVLDAFTRSISLRVTYGQREVTNGLDLRPSQVQNKPRVEIGGEDLRNFYTLVMVDPDVPSPSNPHLREYLHWLVTDIPATTGTTFGNEIVCYENPSPTSGIHRIVLILFRQLGRQTVYAPGWRQQFNTREFAEIYNLGHPVAAVFFNCQRESGCGGRRS

SEQ ID NO: 16 - protein, 175 aa, Beta vulgaris subsp. vulgaris
MPRAPRDPLVVGRVIGDVLDPFSRTVNLRVSYSNRDVNNGCELRPSQVVNQPRVEVGGDDLRTFYTLVMVDPDAPSPSNPHLREYLHWLVTDIPGTTGASFGQEVVCYENPRPSVGIHRFILVLFRQLGRQTVYAPGWRQNFNTRDFAELYNLGLPVAAVYFNCQREGGSGGRRL

SEQ ID NO: 17 - protein, 174 aa, Betula luminifera
MPRERDPLAVGRVIGDVLEPFTRSISLRVTYNSREVNNGCELKPSQVVNQPRVDIGGDDLRTFYTLVMVDPDAPSPSDPNLREYLHWLVTDIPATTGASFGQEVVCYESPRPTVGIHRFVFVLFRQLGRQTVYAPGWRQNFNTRDFAELYNLGLPVAALYFNCQRESGSGGRRR

SEQ ID NO: 18 - protein, 175 aa, Boechera stricta
MSINVRDPLIVSRVVGDVLDPFTRSISLRVTYGQREVTNGLDLRPSQVQNKPRVEIGGTDLRNFYTLVMVDPDVPSPSNPHLREYLHWLVTDIPATTGTNFGNEIVCYENPSPYAGIHRVVMILFRQLGRQTVYAPGWRQNFNTREFAEIYNLGLPVAAVFFNCQRESGCGGRRN

SEQ ID NO: 19 - protein, 200 aa, Camelina sativa
MYVRRTSFKDSDYIRKDCERVKKYICLLSRGDPLVVGRVVGDVLDPFTRLVSLRVTYGQREVTNGLDLRPSQVLNKPMVEVGGDDLRNFYTLVMVDPDVPSPSNPHLREYLHWLVTDIPATTGTAFGNEMVCYESPRPPSGIHRMVLILFRQLGRQTVYAPGWRQQFKTREFAEMYNLGLPVAATYFNCQRENGCGGRRT

SEQ ID NO: 20 - protein, 175 aa, Camelina sativa
MSISRGDPLVVGRVVGDVLDPFIRLVFLRVTYRQREVTNGLDLRPSQVLNKPMVEVGGDDLRNFYTLVMVDPDVPSPSNPHLREYLHWLVTDIPATTGTAFGNEMVCYESPRRPSGIHRMVLILFRQLGRQTVYAPGWRQQFNTREFAEMYNLGLPVAATYFNCQRENGCGGRRT

SEQ ID NO: 21 - protein, 204 aa, Camelina sativa
MIRAETKTQSKTKKQEQLIQKPPVCLRLKMSTTVRDPLIVSRVVGDVLDPFNRSISLRVTYGQREVTNGLDLRPSQVQNKPRVEIGGEDLRNFYTLVMVDPDVPSPSNPHLREYLHWLVTDIPATTGTSFGNEIVCYENPSPSAGIHRVVMILFRQLGRQTVYAPGWRQNFNTREFAEIYNLGLPVAAVFFNCQRESGCGGRRT

SEQ ID NO: 22 - protein, 204 aa, Camelina sativa
MIRAETKTQSKTKKQEQLIQKPPVCLRLKMSTTVRDPLIVSRVVGDVLDPFNRSISLRVTYGQREVTNGLDLRPSQVQNKPRVEIGGEDLRNFYTLVMVDPDVPSPSNPHLREYLHWLVTDIPATTGTTFGNEIVCYENPSPSAGIHRVVMILFRQLGRQTVYAPGWRQNFNTREFAEIYNLGLPVAAVFFNCQRESGCGGRRT

SEQ ID NO: 23 - protein, 175 aa, Camelina sativa
MSTTVRDPLTVSRVVGDVLDPFNRSISLRVTYGQREVTNGLDLRPSQVQNKPRVEIGGEDLRNFYTLVMVDPDVPSPSNPHLREYLHWLVTDIPATTGTSFGNEIVCYENPSPSAGIHRVVMILFRQLGRQTVYAPGWRQNFNTREFAEIYNLGLPVAAVFFNCQRESGCGGRRT

SEQ ID NO: 24 - protein, 174 aa, Camellia sinensis
MPRDRDPLVVGRVIGDVLDPFTRSISLRVTYSSREVTNGCELRPSQVVIQPRVDIGGDDLRTFYTLVMVDPDAPSPSDPNLREYLHWLVTDIPATTGASFGQEVVCYESPRPSMGIHRFVLVLFRQLGRQTVYAPGWRQNFNTRDFAELYNLGSPVAAVYFNCQRETGSGGRRR

SEQ ID NO: 25 - protein, 175 aa, Capsella rubella
MAMSRRDPLVVGSVVGDVLDPFTRLVSLRVTYGQRDVTNGLDLRSSQVLNKPMVEVGGEDLRKFYTLVMVDPDVPSPSNPHLREYLHWLVTDIPATTGTAFGNELVCYECPRPPSGIHRMVLILFRQLGRQTVYAPGWRQQFTTREFAEIYNLGLPVAATYFNCQRENGCGGRRT

SEQ ID NO: 26 - protein, 175 aa, Capsella rubella
MTSNVRDPLIVSRVVGDVLDPFNRSISLRVTYGQREVTNGLDLRPSQVQNKPRVEIGGEDLRNFYTLVMVDPDVPSPSNPHLREYLHWLVTDIPATTGTTFGNEIVCYENPSPSAGIHRVVMTLFRQLGRQTVYAPGWRQNFNTREFTEIYNLGLPVAAVFFNCQRESGCGGRRS

SEQ ID NO: 27 - protein, 175 aa, Cardamine hirsuta
MSINVRDPLLVSRVVGDVLDPFNRSISLRVTYGQREVTNGLDLRPSQVQNKPRVEIGGEDLRNFYTLVMVDPDVPSPSNPHLREYLHWLVTDIPATTGTNFGNEIVCYENPRPSSGIHRVVLILFRQLGRQTVYAPGWRQNFNTREFAEIYNLGLPVAAVFFNCQRESGCGGRRI

SEQ ID NO: 28 - protein, 174 aa, Carica papaya
MTRDRDPLVVGRVIGDVLDPFIRSISLRVNYNSREVNNGCELKPSQVVSQPRVDIGGDDLRTFYTLVMVDPDAPSPSDPNLREYLHWLVTDIPATTGASFGQEIVCYENPRPTVGIHRFVFVLFRQLGRQTVYAPGWRQNFNTRDFAELYNLGLPVASVYFNCQRESGSGGRRR

SEQ ID NO: 29 - protein, 174 aa, Corchorus capsularis
MPRDRDPLVVGRVIGDVLDPFTRSISLRVSFGGREVNNGCELKPSQVVNQPRVDIGGEDLRTFYTLVMVDPDAPSPSDPNLREYLHWLVTDIPATTGATFGQEVVCYESPRPTVGIHRFTFVLFRQLGRQTVYAPGWRQNFNTRDFAELYNLGLPVAAVYFNCQRESGSGGRRR

SEQ ID NO: 30 - protein, 174 aa, Corchorus olitorius
MPRDRDPLVVGRVIGDVLDPFTRSISLRVSFGGREVNNGCELKPSQVVNQPRVDIGGEDLRTFYTLVMVDPDAPSPSDPNLREYLHWLVTDIPATTGATFGQEVVCYESPRPTVGIHRFAFVLFRQLGRQTVYAPGWRQNFNTRDFAELYNLGLPVAAVYFNCQRESGSGGRRR

SEQ ID NO: 31 - protein, 179 aa, Cucumis sativus
MPRDRDPLVVGRVIGDVVDPFSRSISIRVTYSTKEVNNGCELKPSQVVNQPRVEIGGTDLRTFFTLVMVDPDAPSPSDPNLREYLHWLVTDIPATTGATFGQEIVCYESPRPTVGIHRFVLVLFRQLGRQTVYAPGWRQNFNTRDFAELYNLGLPVAAVYFNCQRESGSGGRRRVQDDY

SEQ ID NO: 32 - protein, 179 aa, Cucurbita pepo subsp. pepo
MPRDRDPLVVGRVIGDVIDSFTRSISIRATYNNREISNGCELKPSQVVNQPRVEIGGTDLRTFFTLVMVDPDAPSPSDPNLREYLHWLVTDIPATTGATFGQEIVCYESPRPTVGIHRLVLVLFRQLGRQTVYAPGWRQNFNTRDFAELYNLGLPVAAVYFNCQRESGSGGRRRSQDDF

SEQ ID NO: 33 - protein, 176 aa, Cymbidium goeringii
MNRERDSLIVGRVIGDVLDPFTRRVSLRVTYSSRDVTNGLELKPSAVVEQPRVEVGGNDLRTFYTLVMVDPDAPSPSDPHLREYLHWLVTDIPATTGATFGSEIVCYESPRPSLGIHRFVFVLFHQLGRQTVYAPGWRQNFNTRDFAELYNLGSPVAAVYFNCQREAGSGGRRMQD

SEQ ID NO: 34 - protein, 174 aa, Eriobotrya deflexa
MPRDRDPLVVGRVVGDVLDPFTRSVSLRVTYGNKEVNNGCELKPSQVVHQPRVDTGGDDLRIFYTLVMVDPDAPSPSDPNLKEYLHWLVTDIPATTAASFGQEIVCYESPRPTVGIHRFVFVLFRQLGRQTVYAPGWRQNFNTRDFAELYNLGLPVAAVYFNCQRESGSGGRRR

SEQ ID NO: 35 - protein, 174 aa, Fagus crenata
MPRDRDPLVVGRVIGDVLDPFTRSISLRANYNNREVNNGCELKPSQVVNQPRVDIGGEDLRTFYTLVMVDPDAPSPSDPNLREYLHWLVTDIPATTGASFGQEVVCYESPRPTVGIHRFVFVLFRQLGRQTVYAPGWRQNFNTRDFAELYNLGLPVAAVYFNCQRESGSGGRRR

SEQ ID NO: 36 - protein, 174 aa, Ficus carica
MPRERDPLVVGRVIGDVLDQFTRSISLRVTYGNKEVNNGCELKPSQVVSQPRVDIGGDDLRTFYTLVMVDPDAPSPSDPSLREYLHWLVTDIPATTGASFGQEVVCYESPRPTVGIHRFVFVLFRQLGRQTVYAPGWRQNFNTKDFAELYNLGLPVAAVYYNCQRESGSGGRRR

SEQ ID NO: 37 - protein, 174 aa, Gossypium hirsutum
MPRDRDPLVVGRVIGDVLDPFTRSISLRVTYATRDVNNGVELKPSQVVNQPRVDIGGDDLRTFYTLVMVDPDAPSPSDPNLREYLHWLVTDIPATTGASFGQEVVCYESPRPTVGIHRFVFVLFRQLGRQTVYAPGWRQNFNTRDFAELYNLGLPVAAVYFNCQRESGSGGRRT

SEQ ID NO: 38 - protein, 174 aa, Gossypium raimondii
MPRDRDPLVVGRVIGDVLDPFTRSISLRVTYATRDVSNGVELKPSQVVNQPRVDIGGDDLRTFYTLVMVDPDAPSPSDPNLREYLHWLVTDIPATTGASFGQEVVCYESPRPTVGIHRFVFVLFRQLGRQTVYAPGWRQNFNTRDFAELYNLGLPVAAVYFNCQRESGSGGRRT

SEQ ID NO: 39 - protein, 177 aa, Gypsophila paniculata
MPRVPRDPLVVGRVIGDVLDPFNRSVTLRVTYNGRDVNNGCEFRPSQLVNHPRVEIGGDDLRSFYTLVMADPDAPSPSDPNLREYLHWLVTDIPGTTGTSFGQEVVCYESPRPSVGIHRFIFVLFRQLGRQTVYAPGWRQNFNTRDFAELYNLGLPVAAVYYNCQREGGSGGRRLRD

SEQ ID NO: 40 - protein, 215 aa, Herrania umbratica
MVPKIKVDTTCSYINNSSPVTCLSAFSKQFEKTNSSFCEFSMPRERDPLVVGRVIGDVLDPFSRSISLRVTFASREVNNGCELKPSQVVNQPRVDIGGDDLRTFYTLVMVDPDAPSPSDPNLREYLHWLVTDIPATTGAGFGQEVVCYESPRPTVGIHRFLFVLFRQLGRQTVYAPGWRQNFNTRDFAELYNLGLPVAAVYFNCQRESGSGGRRR

SEQ ID NO: 41 - protein, 174 aa, Hydrangea macrophylla
MPRDRDPLVVGRVIGDVLEPFTRSIALRVTYTNREVNNGCEFRPSQVVNQPRVDIGGDDLRTFYTLVMVDPDAPSPSDPNLREYLHWLVTDIPATTGANFGQEVVCYESPRPSMGIHRFVFVLFRQLGRQTVYAPGWRQNFNTRDFAELYNLGLPVAAVYFNCQRESGSGGRRR

SEQ ID NO: 42 - protein, 174 aa, Juglans regia
MSRDRDPLAVGRVIGDVLDPFTRSITLRITYNNSEINNGCEFKPSQVLNQPRVDVGGDDLRTFYTLVMVDPDAPSPSDPNLREYLHWLVTDIPATTGANFGQEVVCYESPRPTVGIHRFVFVLFRQLGRQTVYAPGWRQNFNTREFAELYNLGLPVAALYFNCQRESGSGGRRR

SEQ ID NO: 43 - protein, 174 aa, Litchi chinensis
MPRDRDPLVVGRVIGDVLNPFTKSISLTVSYNNREINNGCELKPSQIVNQPRVDIGGDDLRTFYTLVMVDPDAPSPSEPRLREYLHWLVTDIPATTGATFGQEVVCYESPRPTSGIHRFIFVLFRQLGRQTVYAPGWRQNFNTKEFAELYNLGSPVAAVYFNCQRESGSGGRRR

SEQ ID NO: 44 - protein, 174 aa, Malus domestica
MPRDRDPLVVGRVVGDVLDPFTRSVSLRVTYGNKEVNNGCELKPSQVVHQPRVDTGGDDLRTFYTLVMVDPDAPSPSDPNLKEYLHWLVTDIPATTAASFGQEIVCYESPRPTVGIHRFVFVLFRQLGRQTVYAPGWRQNFNTRDFAELYNLGLPVAAVYFNCQRESGSGGRRR

SEQ ID NO: 45 - protein, 174 aa, Nelumbo nucifera
MPRERDPLVVGRVIGDVLDHFNKSISLRVTYNSRDVTNGCEFKPSLVINQPRVEIGGDDLRTFYTLVMVDPDAPSPSNPNLKEYLHWLVTDIPATTGASFGQEIVCYESPRPTIGIHRFVFVLFRQLGRQTVYAPGWRQNFNTRDFAELYNLGLPVAAVYYNCQRESGSGGRRR

SEQ ID NO: 46 - protein, 177 aa, Nicotiana attenuata
MPREREPLVVGRVIGDVLDPFTRSIGLRVIYRDREVNNGCELRPSQVVNQPRVEVGGDDLRTFYTLVMVDPDAPSPSDPSLREYLHWLVTDIPATTGASFGQEVVCYESPRPTMGIHRFVFVLFRQLGRQTVYAPGWRQNFNTKDFAELYNLGLPVAAVYFNCQRESGSGGRRRSAD

SEQ ID NO: 47 - protein, 177 aa, Nicotiana sylvestris
MPREREPLVVGRVIGDVLDPFTRSIGLRVIYRDREVNNGCELRPSQVVNQPRVEVGGDDLRTFYTLVMVDPDAPSPSDPNLREYLHWLVTDIPATTGASFGQEIVCYESPRPTMGIHRFVFVLFRQLGRQTVYAPGWRQNFNTKDFAELYNLGLPVAAVYFNCQRESGSGGRRRSAD

SEQ ID NO: 48 - protein, 174 aa, Olea europaea var. sylvestris
MPRDRDPLVVGRIIGDVLDPFTRSVPLRIVYADREVNNGWDFRPSQIVNRPRVEIGGDDLRTFYTLIMVDPDAPSPSESSLREYLHWLVTDIPATTGSSFGQEIVCYENPQPTMGIHRLVFVLFQQLGRQTVYAPGWRQNFNTREFAEIYNLGSPVAAVYFNCQRESGTGGRRS

SEQ ID NO: 49 - protein, 174 aa, Parasponia andersonii
MPRDRDPLVVGRVIGDVLDPFTRSISLRVTYGGKEVNNGCELKPSQVVNQPHVDIGGDDLRTFYTLVMVDPDAPSPSDPNLREYLHWLVTDIPATTGAGFGQEVVCYESPRPTAGIHRFVFVLFRQLGRQTVYAPGWRQNFNTKDFAELYNLGLPVAAVYYNCQRESGSGGRRR

SEQ ID NO: 50 - protein, 174 aa, Populus euphratica
MSRDRDPLSVGRVIGDVLDPFTKSIPLRVTYNSREVNNGCELKPSQVANQPRVDIGGEDLRTFYTLVMVDPDAPSPSDPSLREYLHWLVTDIPATTGASFGHETVCYESPRPTMGIHRFVFVLFRQLGRQTVYAPGWRQNFNTRDFAEVYNLGSPVAAVYFNCQRESGSGGRRR

SEQ ID NO: 51 - protein, 174 aa, Populus euphratica
MPRDREPLSVGRVIGDVLDPFTRSISLRVNYNSREVNNGYELKPSHVVNQPRVDIGGEDLRTFYTLVMVDPDAPSPSNPNLREYLHWLVTDIPATTGANFGQEVVCYESPRPTAGIHRFVFVLFRQLGRQTVYAPGWRQNFNTRDFAELYNLGSPVAAVYFNCQRESGSGGRRP

SEQ ID NO: 52 - protein, 174 aa, Populus nigra
MSRDRDPLSVGRVIGDVLDPFTKSISLRVTYSSREVNNGCELKPSQVANQPRVDIGGEDLRTFYTLVMVDPDAPSPSDPSLREYLHWLVTDIPATTGASFGHETVCYENPRPTMGIHRFVFVLFRQLGRQTVYAPGWRQNFNTRDFAEVYNLGSPVAAVYFNCQRESGSGGRRR

SEQ ID NO: 53 - protein, 174 aa, Populus nigra
MPRDREPLSVGRVIGDVLDPFTRSISLRVNYNSREVNNGCELKPSHVVNQPRVDIGGEDLRTFYTLVMVDPDAPSPSNPNLREYLHWLVTDIPATTGANFGQEVVCYESPRPTAGIHRFVFVLFRQLGRQTVYAPGWRQNFNTRDFAELYNLGSPVAAVYFNCQRESGSGGRRP

SEQ ID NO: 54 - protein, 174 aa, Populus tomentosa
MPRDREPLSVGRVIGDVLDPFTRSVSLRVSYNSREVNNGCELKPSHVVNQPRVDIGGEDLRTFYTLVMVDPDAPSPSNPNLREYLHWLVTDIPATTGANFGQEVVCYESPRPTAGIHRFVFVLFRQLGRQTVYAPGWRQNFNTRDFAELYNLGSPVAAVYFNCQRESGSGGRRP

SEQ ID NO: 55 - protein, 174 aa, Populus trichocarpa
MSRDRDPLSVGRVIGDVLDPFTKSISLRVTYSSREVNNGCELKPSQVANQPRVDIGGEDLRTFYTLVMVDPDAPSPSDPSLREYLHWLVTDIPATTGASFGHETVCYESPRPTMGIHRFVFVLFRQLGRQTVYAPGWRQNFNTRDFAEVYNLGSPVAAVYFNCQRESGSGGRRR

SEQ ID NO: 56 - protein, 174 aa, Prunus avium
MPRDRDPLVVGRVVGDVLDPFTRSVSLRVTYGMKEVNNGCELKPSQVVHQPRVDTGGDDLRTFYTLVMVDPDAPSPSDPNLKEYLHWLVTDIPATTAASFGQEIVCYESPRPTVGIHRFVLVLFRQLGRQTVYAPGWRQNFNTRDFAELYNLGLPVAAVYFNCQRESGSGGRRR

SEQ ID NO: 57 - protein, 174 aa, Prunus mume
MPRDRDPLVVGRVVGDVLDPFTRSVSLRVTYGLKEVNNGCELKPSQVVQQPRVDIGGDDLRTFYTLVMVDPDAPSPSDPNLKEYLHWLVTDIPATTAASFGQEIVCYESPRPTVGIHRFVLVLFRQLGRQTVYAPGWRQNFNTRDFAELYNLGLPVAAVYFNCQRESGSGGRRR

SEQ ID NO: 58 - protein, 174 aa, Prunus mume
MPRDRDPLVVGRVVGDVLDPFTRSVSLRVTYGLKEVNNGCELKPSQVVQQPRVDIGGDDLRTFYTLVMVDPDAPSPSDPNLKEYLHWLVTDIPATTAASFGQEIVCYESPRPTVGIHRFVLVLFRQLGRQTVYAPGWRQNFNTRDFAELYNLGLPVSAVYFNCQRESGSGGRRR

SEQ ID NO: 59 - protein, 174 aa, Prunus mume
MPRDRDPLVVGRVVGDVLDPFTRSVSLRVTYGLKEVNNGCELKPSQVVQQPRVDIGGDDLRTFYTLVMVDPDAPSPSDPNLKEYLHWLVTDIPATTAASFGQEIVCYESPRPTVGIHRFVLVLFRQLGRQTVYAPGWRLNFNTRDFAELYNLGLPVAAVYFNCQRESGSGGRRR

SEQ ID NO: 60 - protein, 174 aa, Prunus persica
MPRDRDPLVVGRVVGDVLDPFTRSVSLRVTYGMKEVNNGCELKPSQVVQQPRVDTGGDDLRTFYTLVMVDPDAPSPSDPNLKEYLHWLVTDIPATTAASFGQEIVCYESPRPTVGIHRFVLVLFRQLGRQTVYAPGWRQNFNTRDFAELYNLGLPVSAVYFNCQRESGSGGRRR

SEQ ID NO: 61 - protein, 173 aa, Prunus pseudocerasus
MPRDRDPLVVGRVVGDVLDPFTRSVSLRVTYGVKEVNNGCELKPSQVVHQPRVDTGGDDLRTFYTLVMVDPDAPSPSDPNLKEYLHWLVTDIPATTAASFGQEIVCYESPRPTVGIHRFVLVLFRQLGRQTVYAPGWRQNFNTRDFAELYNLGLPVAAVYFNCQRESGSGGRR

SEQ ID NO: 62 - protein, 174 aa, Prunus yedoensis var. nudiflora
MPRDRDPLVVGRVVGDVLDPFTRSVSLRVTYGVKEVNNGCELKPSQVVHQPRVDTGGDDLRTFYTLVMVDPDAPSPSDPNLKEYLHWLVTDIPATTAASFGQEIVCYESPRPTVGIHRFVLVLFRQLGRQTVYAPGWRQNFNTRDFAELYNLGLPVAAVYFNCQRESGSGGRRR

SEQ ID NO: 63 - protein, 174 aa, Prunus yedoensis var. nudiflora
MPRDRDPLVVGRVVGDVLDPFARSVSLRVTYGVKEVNNGCELKPSQVVHQPRVDTGGDDLRTFYTLVMVDPDAPSPSDPNLKEYLHWLVTDIPATTAASFGQEIVCYESPRPTVGIHRFVLVLFRQLGRQTVYAPGWRQNFNTRDFAELYNLGLPVAAVYFNCQRESGSGGRRR

SEQ ID NO: 64 - protein, 174 aa, Pyrus pyrifolia var. culta
MPRDRDPLVVGRVVGDVLDPFTRSVSLRVTYGTKEVNNGCELKPSQVVQQPRVDIGGDDLRTFYTLVMVDPDAPSPSDPNLKEYLHWLVTDIPATTAASFGQEIVCYESPRPTVGIHRFVLVVFRQLGRQTVYAPGWRQNFNTRDFAELYNLGLPVSVVYFNCQRESGSGGRRR

SEQ ID NO: 65 - protein, 174 aa, Pyrus x bretschneideri
MPRDRDPLVVGRVVGDVLDPFTRSVSLRVTYGNKEVNNGCELKPSQVVQQPRVDTGGDDLRTFYTLVMVDPDAPSPSDPNLKEYLHWLVTDIPATTAASFGQEIVCYESPRPTVGIHRFVFVLFRQLGRQTVYAPGWRQNFNTRDFAELYNLGLPVAAVYFNCQRESGSGGRRR

SEQ ID NO: 66 - protein, 174 aa, Quercus suber
MPRDRDPLVVGRVIGDVLDPFTRSISLRVTYNNREVNNGCELKPSHVVNQPRVDIGGDDLRTFYTLVMVDPDAPSPSDPNLREYLHWLVTDIPATTGASFGQEVVCYESPRPTVGIHRFAFVLFRQLGRQTVYAPGWRQNFNTKDFAELYNLGLPVAAVYFNCQRESGSGGRRR

SEQ ID NO: 67 - protein, 174 aa, Rosa chinensis
MPRDRDPLVVGRVIGDVLDPFTRSVSLRVTFATREVNNGCELKPSQVVTQPRVDIGGEDLRTFYTLVMVDPDAPSPSDPNLKEYMHWLVTDIPATTGASFGQEIVCYESPRPTVGIHRFVFVLFRQLGRQTVYAPGWRQNFNTKDFAELYNLGSPVAAVYFNCQRESGSGGRRR

SEQ ID NO: 68 - protein, 174 aa, Sesamum indicum
MPRDRDPLVVGRVVGDVLDPFTRSVGLRVIYSSREVSNGCEFRPSQVLNQPRVDVGGDDLRTFFTLVMVDPDAPSPSDPSLREYLHWLVTDIPATTGASFGQEIVCYENPRPSMGIHRFVFVLFRQLGRQTVYAPGWRQNFNTRDFAELYNLGSPVAAVYYNCQRESGTGGRRR

SEQ ID NO: 69 - protein, 175 aa, Shorea curtisii
MPRDRLDPLVVGRVVGDVLDPFTRSISLRVSYNNREVTNGCEFRPSQLVNQPRVDIGGDDMRTFYTLVMVDPDAPSPSDPNLREYLHWLVTDIPATTGASFGQEVVCYENPGPSIGIHRFVFVLFRQLGRQTVYAPGWRQNFNTKDFAELYNLGSPVAAVYFNCQRESGSGGRRG

SEQ ID NO: 70 - protein, 177 aa, Solanum lycopersicum
MPRERDPLVVGRVVGDVLDPFTRTIGLRVIYRDREVNNGCELRPSQVINQPRVEVGGDDLRTFFTLVMVDPDAPSPSDPNLREYLHWLVTDIPATTGSSFGQEIVSYESPRPSMGIHRFVFVLFRQLGRQTVYAPGWRQNFNTRDFAELYNLGLPVAAVYFNCQRESGSGGRRRSAD

SEQ ID NO: 71 - protein, 181 aa, Tarenaya hassleriana
MRGSIDQNMTVVRDPLVVGRVVGDVLDPFTRSISLRVTYQREVSNGCDLRPSHVLHKPRVDIGGDDLRTFYTLVMVDPDAPSPSNPHLREYLHWLVTDIPATTGANFGNEVVCYENPRPTSGIHRFVLILFRQLGRQTVYAPGWRQNFNTREFAELYNLGLPVAAVYFNCQRESGCGGRRT

SEQ ID NO: 72 - protein, 175 aa, Tarenaya hassleriana
MAARDPLVIGRVVGDVLEPFTRSIPLRVIYNQREVTNGCDLRPSHVSHKPRVEIGGDDLRTLYTLVMVDPDAPSPSNPHLREYLHWLVTDIPATTGASFGNEVVCYENPRPTSGIHRFVVVLFRQQLGRQTLYAPGWRQHFNTREFAELYNLGLPVAAVYFNCQRESGCGGRRLM

SEQ ID NO: 73 - protein, 174 aa, Theobroma cacao
MPRERDPLVVGRVIGDVLDPFTRSISLRVTFACREVNNGCELKPSQVVNQPRVDIGGDDLRTFYTLVMVDPDAPSPSDPNLREYLHWLVTDIPATTGASFGQEVVCYESPRPTVGIHRFLFVLFRQLGRQTVYAPGWRQNFNTRDFAELYNLGLPVAAVYFNCQRESGSGGRRR

SEQ ID NO: 74 - protein, 174 aa, Trema orientale
MPRDRDPLVVGRVIGDVLDSFTRSISLRVTYGSREVNNGCELKPSQVVNQPHVDIGGDDLRTFYTLVMVDPDAPSPSDPNLREYLHWLVTDIPATTGPGFGQEVVCYESPRPTAGIHRFVFVLFRQLGRQTVYAPGWRQNFNTKDFAELYNLGLPVAAVYYNCQRESGSGGRRR

SEQ ID NO: 75 - protein, 174 aa, Vitis labrusca x Vitis vinifera
MPRERDPLVVGRVVGDVLDPFLRSITLRVTYNNREVANGCEFRPSQLVSQPRVDIGGDDLRTFYTLVMVDPDAPSPSNPNLREYLHWLVTDIPATTGANFGQEIVCYESPRPTAGIHCFVFVLFRQLGRQTVYAPGWRQNFNTRDFAELYNLGLPVAAVYFNCQREGGSGGRRS

SEQ ID NO: 76 - protein, 174 aa, Vitis labrusca x Vitis vinifera
MPRERDPLVVGRVVGDVLDPFLRSITLRVTYNNREVANGCEFRPSQLVSQPRVDIGGDDLRTFYTLVMVDPDAPSPSNPNLREYLHWLVTDIPATTGANFGQEIVCYESPRPTAGIHRFVFVLFRQLGRQTVYAPGWRQNLNTRDFAELYNLGLPVAAVYFNCQREGGSGGRRS

SEQ ID NO: 77 - protein, 174 aa, Vitis labrusca x Vitis vinifera
MPRERDPLVVGRVVGDVLDPFLRSITLRVTYNNREVANGCEFRPSQLVSQPRVDIGGDDLRTFYTLVMVDPDAPSPSNPNLREYLHWLVTDIPATTGANFGQEIVCHESPRPTAGIHRFVFVLFRQLGRQTVYAPGWRQNFNTRDFAELYNLGLPVAAVYFNCQREGGSGGRRS

SEQ ID NO: 78 - protein, 174 aa, Vitis vinifera
MPRERDPLVVGRVVGDVLDPFLRSITLRVTYNNREVANGCEFRPSQLVSQPRVDIGGDDLRTFYTLVMVDPDAPSPSNPNLREYLHWLVTDIPATTGANFGQEIVCYESPRPTAGIHRFVFVLFRQLGRQTVYAPGWRQNFNTRDFAELYNLGLPVAAVYFNCQREGGSGGRRS

SEQ ID NO: 79 - protein, 174 aa, Ziziphus jujuba
MPRERDPLVVGRVIGDVLDPFTRSISLRVSYGNREVNNGCELKPSHVVSQPRVDIGGDDLRTFYTLVMVDPDAPSPSDPNLREYLHWLVTDIPATTGASFGQEVVCYESPRPTVGIHRFVFVLFRQLGRQTVYAPGWRQNFNTRDFAELYNLGLPVAAVYFNCQRESGSGGRRR

SEQ ID NO: 80 - protein, 177 aa, Nicotiana tabacum
MSRLDPLIVSGVIGDVLDPFTRSIDFNVVYNNRMQVYNGCGLRPSQIVHQPRVDVGGDDLRTFYTLVMVDPDAPTPSNPNQREYLHWLVTNIPATTGAHFGNEIIQYESPRPSLGIHRYIFVLFRQLTRDVVNAPDIIDSRENFNTRDFARFYDLNSPVAAMYFNSNRESGTGGRHL

SEQ ID NO: 81 - protein, 177 aa, Nicotiana tabacum
MSRLDPLIVSGVIGDVLDSFTRSIDFSVVYNNRVQVYNGCGLRPSQIVNQPRVDIGGDDLRTFYTMVMVDPDAPTPSNPNLREYLHWLVTDIPATTGANFGNEIIRYESPRPSLGIHRYIFVLFQQLDREVVNAPDIIDSRQNFNTRDFARFHNLNSPVAAVYFNCNREGGTGGRHL

SEQ ID NO: 82 - protein, 177 aa, Nicotiana tabacum
MLRANPLVVSGVIGDVLDPFTKSVDFDVVYNNNVQVYNGCGLRPSQIVNQPRVDIAGDDFRTFYTLVMVDPDAPTPSNPNLREYLHWLVTDIPATTEATFGNEIVSYERPQPSLGIHRYIFVLFRQLDREVVNAPDIIDSREIFNTRDFARFHGLNLPVAAVYFNCNREGGTGGRHL

SEQ ID NO: 83 - protein, 172 aa, Actinidia chinensis var. chinensis
MARLMEPLTVGRVVGEVVDNFSPSVRMSVTYNNKQVSNGHELMPSVITTRARVEIGGEDMRAAYTLIMTDPDAPSPSDPYLREHLHWIVTDIPGTTDASFGREIVSYETPKPVIGIHRYVFILFKQRARQTVRPPASRECFNTRDFSQVNGLGLPVAAVYFNAQRETAPRRR

SEQ ID NO: 84 - protein, 172 aa, Actinidia chinensis var. chinensis
MARLMEPLTVGRVVGEVVDNFSPSVRMSVTYNNKQVSNGHELMPSVINTRARVEIGGEDMRAAYTLIMTDPDAPSPSDPYLREHLHWIVTDIPGTTDASFGREIVSYETPKPVIGIHRYVFILFKQRARQTVRPPASRECFNTRDFSQVNGLGLPVAAVYFNAQRETAPRRR

SEQ ID NO: 85 - protein, 173 aa, Actinidia chinensis var. chinensis
MSRLVEPLTLGRVVGEVVDTFTPSVRMSVTYNCNKQVCNGYELMPSVITSKPRVEIGGEDMRAAYTLIMTDPDAPSPSDPYLREHLHWIVTDIPGTTDASFGREIMSYEMPKPVIGIHRYVFFLFKQKARQTVKPPASRDHFNTRDFSEEYGLGLPVAAVYFNAQRETAARRR

SEQ ID NO: 86 - protein, 173 aa, Actinidia chinensis var. chinensis
MSRLVEPLTLGRVVGEVVDTFTPSVRMSVTYNCNKQVCNGYELMPSVITSKPRVEIGGEDMRAAYTLIMTDPDAPSPSDPYLREHLHWIVTDIPGTTDASFGREIMSYEMPKPVIGIHRYVLFLFKQKARQTVKPPASRDHFNTRDFSEEYGLGLPVAAVYFNAQRETAARRR

SEQ ID NO: 87 - protein, 173 aa, Actinidia chinensis var. chinensis
MSRQVEQLTLGRVVGEVVDTFTPSVRMRVTYNCNKQVFNGSELMPSIVSSKPRVEIGGEDMRAAYTLIMTDPDAPSPSDPYLREHVHWIVTDIPGTTDDSFGREIVSYEMPRPVIGIHRYVFLLFKQRSRQTVNPPDSTDHFNTRDFSEEYGLGLPVAAVYFNAQRETAARRR

SEQ ID NO: 88 - protein, 175 aa, Amborella trichopoda
MPRERDPLMVGRVIGDVLDPFNRSVTLNVIYNSREVTNGCELKPSAVVHPPRVDIGGSDMRTFYTLVMVDPDAPSPSDPSLREYLHWLVTDIPATTGASFGQEILCYEHPQPTVGIHRFVYVLFRQLGRQTVYAPSWRQNFNTREFAELYNLGLPVAAVYYNCQRESGSGGRRMR

SEQ ID NO: 89 - protein, 173 aa, Aquilegia coerulea
MSKMNETLSVGRVVGEVVDSFTPSVKLEVTYNSNKQVYNGHELMPATITAKPRVQIGGDDMRSTYTLVMTDPDAPSPSDPHLREHLHWLVTNIPGTTDASFGKELIAYEPPKPVIGIHRFVFILFKQKGRQAVKAPTSRDRFNTRRFSEENGLGLPVAAVYFNAQRETAPRRR

SEQ ID NO: 90 - protein, 177 aa, Arabidopsis lyrata subsp. lyrata
MSREIEPLIVGRVVGDVLEMFNPSVTMRVTFNSNTIVSNGHELAPSLLLSKPRVEIGGQDLRSFFTLIMMDPDAPSPSNPYMREYLHWMVTDIPGTTDASFGREIVRYETPKPVAGIHRYVFALFKQRGRQTVKAGPETRECFNTKAFSSYFGLSLPVAAVYFNAQRETAPRRRPSY

SEQ ID NO: 91 - protein, 175 aa, Arabidopsis lyrata subsp. lyrata
MSINIRDPLIVSRVVGDILDPFNRSISLRVTYGQREVTNGLDLRPSQVQNKPRVEIGGEDLRNFYTLVMVDPDVPSPSNPHLREYLHWLVTDIPATTGTTFGNEIVCYENPSPTAGIHRIVLILFRQLGRQTVYTPGWRQNFNTREFAEIYNLGLPVAAVFYNCQRESGCGGRRI

SEQ ID NO: 92 - protein, 175 aa, Arabidopsis lyrata subsp. petraea
MSIYIRDPLIVSRVVGDILDPFNRSISLRVTYGQREVTNGLDLRPSQVQNKPRVEIGGEDLRNFYTLVMVDPDVPSPSNPHHREYLHWLVTDIPATTGTTYGNEIVCYENPSPTAGIHRIVLILFRQLGRQTVYTPGWRQNFNTREFAEIYNLGLPVAAVFYNCQRESGCGGRRI

SEQ ID NO: 93 - protein, 175 aa, Arabidopsis lyrata subsp. petraea
MSINIRDPLIVSRVVGDILDPFNRSISLRVTYGQRDVTNGLDLRPSQVQNKPRVEIGGEDLRNFYTLVMVDPDVPSPSNPHLREYLHWLVTDIPATTGTTFGNEIVCYENPSPTAGIHRIVLILFRQLGRQTVYTPGWRQNFNTREFAEIYNLGLPVAAVFYNCQRESGCGGRRI

SEQ ID NO: 94 - protein, 177 aa, Arabidopsis thaliana
MSREIEPLIVGRVIGDVLEMFNPSVTMRVTFNSNTIVSNGHELAPSLLLSKPRVEIGGQDLRSFFTLIMMDPDAPSPSNPYMREYLHWMVTDIPGTTDASFGREIVRYETPKPVAGIHRYVFALFKQRGRQAVKAAPETRECFNTNAFSSYFGLSQPVAAVYFNAQRETAPRRRPSY

SEQ ID NO: 95 - protein, 177 aa, Arabidopsis thaliana
MSREIEPLIVGRVIGDVLEMFNPSVIMRVTFNSNTIVSNGHELAPSLLLSKPRVEIGGQDLCSFFTLIMMDPDAPSPSNPYMREYLHWMVTDIPGTTDASFGREIVRYETPKPVAGIHRYVFALFKQRGRQAVKAAPETRECFNTNAFSSYFGLSQPVAAVYFNAQRETAPRRRPSY

SEQ ID NO: 96 - protein, 177 aa, Arabis alpina
MSREIEPLIVGRVIGEVIEMFNPSVTMRVTFNSNTIVSNGHELAPSLFLSKPRVEIGGHDLRSFFTLIMIDPDAPSPSNPYMREYLHWMVTDIPGTTDASFGREIVRYETPKPVIGIHRYAFVLFKQSGRQMVKTAPITRERFSTRDFSSFYDLSLPVAAVYFNAQRETAPRRRPSY

SEQ ID NO: 97 - protein, 158 aa, Arabis alpina
MFNPSVTMRVTFNSNTIVSNGHELAPSLFLSKPRVEIGGHDLRSFFTLIMIDPDAPSPSNPYMREYLHWMVTDIPGTTDASFGREIVRYETPKPVIGIHRYAFVLFKQSGRQMVKTAPITRERFSTRDFSSFYDLSLPVAAVYFNAQRETAPRRRPSY

SEQ ID NO: 98 - protein, 176 aa, Arabis alpina
MSLSRRDSLAVGRVVGDVLDPFTRLISLKVTYGQRQVTNGIDLRSSQVVNKPMVEIGGDDLRNFYTLVMVDPDVPSPSNPYLREYLHWLVTDIPGTTGTAFGNEMVCYENPCPTSGIHRLVLTLFRQLGRQTVYAPEWRQRFNTREFAENYNLGLPVAAVFFNCQKENGCGGRRTS

SEQ ID NO: 99 - protein, 175 aa, Arabis alpina
MSLSGKDPHVVGRVVGDVVDPFTRLISLKVTYGQRQVTNGLDLRSSQVVNKPMVEIGGFDLRNFYTLVMVDLDVPSPSNPYLREYLHWLVTDIPATTGTAFGNEMVCYENPCPTSGIHRLVLIMFRQLGRQTVYAPEWRQRFNTREFAENYNLGLPLAAVFFNCQRQNGCGGRRS

SEQ ID NO: 100 - protein, 174 aa, Beta vulgaris subsp. vulgaris
MARGVEPLIIGRVIGEVIDIFNPSVTLNVTYNSSKQVCNGHELMPAVVVSKPRVEIGGEDMRSAYTLIMVDPDAPSPSDPYLREHLHWIVTDIPGTTDISFGKEIVCYETPKPVVGIHRYIFILFNQIRGRQTVRSPTSRECFNTRRFAAENGLGLPVAVVYFNAQRETAARRR

SEQ ID NO: 101 - protein, 175 aa, Brassica carinata
MSLSNRDPLVVGRVVGDVLECFTRSIDLRVTYGQREVTNGLDLRPSQVLNKPRVEIGGEDLRNFYTLVMVDPDVPSPSNPHLREYLHWLVTDIPATTGTNFGNEIVSYESPRPNSGIHRIVLILFRQLGRQTVYEPGWRQQFNTREFASLYNLGLPVAAVFYNCQRESGCGGRRS

SEQ ID NO: 102 - protein, 175 aa, Brassica carinata
MSLSNRDPLVVGRVVGDVLECFTRSIDLRVTYGQREVTNGLDLRPSQVLNKPRVEIGGEDLRNFYTLVMVDPDVPSPSNPHLREYLHWLVTDIPATTGTNFGNEIVSYESPRPNSGIHRIVLVLFRQLGRQTVYEPGWRQQLNTREFASLYNLGLPVAAVFYNCQRESGCGGRRS

SEQ ID NO: 103 - protein, 175 aa, Brassica carinata
MALNNRDPLVVGGVIGDVLERFTRSIDLRVTYGQREVTNGLDIRPSQILNKPRVEIGGEDLRNFYTLVMVDPDVPSPSNPHLREYLHWLVTDIPATTGTNFGNEIVSYENPRPTSGIHRIVLVLFRQLGRQTVYEPGWRPQFNTREFAALYNLGLPAAAVYFNCQRDNGCGGRRS

SEQ ID NO: 104 - protein, 175 aa, Brassica juncea
MSLSNRDPLVVGRVVGDVLECFTRSIDLRVTYGQREVTNGLDLRPSQVLNKPRVEIGGEDLRNFYTLVMVDPDVPSPSSPHLREYLHWLVTDIPATTGTNFGNEIVSYESPRPNSGIHRIVLVLFRQLGRQTVYEPGWRQQFNTREFASLYNLGLPVAAVFYNCQRESGCGGRRS

SEQ ID NO: 105 - protein, 175 aa, Brassica juncea
MSLSNRDTLVVGRVVGDVLECFTRSIDLRVTYGQREVTNGLDLRPSQVLNKPRVEIGGEDLRNFYTLVMVDPDVPSPSNPHLREYLHWLVTDIPATTGTNFGNEIVSYESPRPNSGIHRIVLVLFRQLGRQTVYEPGWRQQFNTREFASLYNLGLPVAAVFYNCQRESGCGGRRS

SEQ ID NO: 106 - protein, 175 aa, Brassica juncea
MSLSNRDPLVVGGVIGDVLEQFTRSIDLRVTYGQREVTNGLDIRPSQILNKPRVEIGGDDLRNFYTLVMVDPDVPSPSNPHLREYLHWLVTDIPATTGTNFGNEIVSYENPRPTSGIHRIVLVLFRQLGRQTVYEPGWRPQFNTREFAALYNLGLPVAAVFYNCQRESGCGGRRS

SEQ ID NO: 107 - protein, 177 aa, Brassica napus
MSREIEPLIVGRVIGDVIEMFNPSVTMRVTYNSNTVVSNGHELAPSLLLSRPRVEIGGHDLRSFFTLIMMDPDAPSPSNPYMREYLHWMVTDIPGTTDASFGREMVRYETPKPVIGIHRYAFVLFRQRGRQTVKAAPATRECFNTRDFSAFFGLSLPVAAVYFNAQRETAPRRRPSY

SEQ ID NO: 108 - protein, 207 aa, Brassica napus
MAHSKETSINHNTQYTIEKSCSNKGKKRSIMSREIEPLIVGRVIGDVIEMFNPSVTMRVTYNSNTVVSNGHELAPSVLLSRPRVEIGGHDLRSFFTLIMMDPDAPSPSNPYMREYLHWMVTDIPGTTDASFGREMVRYETPKPVIGIHRYAFVLFRQRGRQTVKAAPATRECFNTRDFSAFFGLSLPVAAVYFNAQRETAPRRRPSY

SEQ ID NO: 109 - protein, 175 aa, Brassica napus
MSLSNRDPLVVGRVVGDVLECFTRSIDLRVTYGQREVTNGLDLRPSQVINKPRVEIGGEDLRNFYTLVMVDPDVPSPSNPHLREYLHWLVTDIPATTGTNFGNEIVSYESPRPNSGIHRIVLVLFRQLGRQTVYEPGWRQQFNTREFASLYNLGLPVAAVFYNCQRESGCGGRRS

SEQ ID NO: 110 - protein, 175 aa, Brassica napus
MSLNNRDPLVVGGVIGDVLEQFTRSIDLRVTYGQREVTNGLDIRPSQILNKPRVEIGGDDLRNFYTLVMVDPDVPSPSNPHLREYLHWLVTDIPATTGTNFGNEIVSYENPRPTSGIHRIVLVLFRQLGRQTVYEPGWRPQFNTREFAALYNLGLPAAAVYFNCQRDNGCGGRRS

SEQ ID NO: 111 - protein, 175 aa, Brassica napus
MSLSNRDPLVVGGVIGDVLERFTRSIDLRVTYGQREVTNGLDIRPSQILNKPRVEIGGEDLRNFYTLVMVDPDVPSPSNPHLREYLHWLVTDIPATTGTNFGNEIVSYENPRPTSGIHRIVLVLFRQLGRQTVYEPGWRPQFNTREFAALYNLGLPAAAVYFNCQRDNGCGGRRS

SEQ ID NO: 112 - protein, 175 aa, Brassica napus
MSLNNRDPLVVGGVIGDVLEQFTRSIDLRVTYGQREVTNGLDIRPSQILNKPRVEIGGDDLRNFYTLVMVDPDVPSPSNPHLREYLHWLVTDIPATTGTNFGNEIVSYENPRPTSGIHRIVLVLFRQLGRQTVYEPGWRPQFNTREFAALYNLGLPAAAVYFSCQRDNGCGGRRS

SEQ ID NO: 113 - protein, 175 aa, Brassica napus
MSVNNRDPLVVGGVIGDVLERFTRSIDLRVTYGQREVTNGLDIRPSQIINKPRVEIGGEDLRNFYTLVMVDPDVPSPSNPHLREYLHWLVTDIPATTGTNFGNEIVSYESPRPTSGIHRLVLVLFRQLGRQTVYEPGWRPQFNTREFAALYNLSLPVAAVYFNCQRDNGCGGRRT

SEQ ID NO: 114 - protein, 175 aa, Brassica napus
MSVNNRDPLVVGGVIGDVLERFTRSIDLRVTYGQREVTNGLDIRPSQILNKPRVEIGGEDLRNFYTLVMVDPDVPSPSNPHLREYLHWLVTDIPATTGTNFGNEIVSYENPRPTSGIHRIVLVLFRQLGRQTVYEPGWRPQFNTREFAALYNLGLPAAAVYFNCQRDNGCGGRRC

SEQ ID NO: 115 - protein, 175 aa, Brassica napus
MSLSPRDPLVLARVVGDVVDPFMRLISLTVNYGQRQVTNGLDLRTSQVLNKPTVEIGGDDLRNFYTLVMVDPDVPSPSNPHLREYLHWLVTDIPATTGTAFGNELVHYENPCPTSGIHRVALMLFWQLGRQTVYAPEWRQRFNTREFAENYNLGLPVAAVFFNCQRENGCGGRRT

SEQ ID NO: 116 - protein, 176 aa, Brassica napus
MSLSPRDPLIVGRVVGDVVDPFMRLISLNVTYGQRQITNGMDLRSSQVLNKPTVEIGGDDLRNFYTLVMVDPDVPSPSNPYLREYLHWLVTDIPATTGTTFGNELVYYENPCPTSGIHRVALILFRQLGRQTVYAPQWRQRFNTREFAENYNLGLPVAAVYFNCQRENGCGGRRTS

SEQ ID NO: 117 - protein, 175 aa, Brassica napus
MSLSPRDPLVLARVVGDVVDPFMRLISLTVNYGQRQVTNGLDLRTSQVLNKPTVEIGGDDLRNFYTLVRLSPDVPSPSNPHLREYLHWLVTDIPATTGTAFGNELVHYENPCPNSGIHRVALMLSRQLRRQTVYAPEWRQRFNTRAFAENNNLGLPVAAVFFNCQRDNGCGGRRT

SEQ ID NO: 118 - protein, 175 aa, Brassica oleracea
MSLSNRDPLVVGGVIGDVLEQFTRSIDLRVTYGQREVTNGLDIRPSQILNKPRVEIGGDDLRNFYTLVMVDPDVPSPSNPHLREYLHWLVTDIPATTGTNFGNEIVSYENPRPTSGIHRIVLVLFRQLGRQTVYEPGWRPQFNTREFAALYNLGLPAAAVYFNCQRDNGCGGRRS

SEQ ID NO: 119 - protein, 175 aa, Brassica oleracea
MSLSRRDPLVVGGVIGDVLERFTRSIDLRVTYGQREVTNGLDIRPSQILNKPRVEIGGEDLRNFYTLVMVDPDVPSPSNPHLREYLHWLVTDIPATTGTNFGNEIVSYENPRLTSGIHRIVLVLFRQLGRQTVYEPGWRPQFNTREFAALYNLGLPAAAVYFNCQRENGCGGRRT

SEQ ID NO: 120 - protein, 175 aa, Brassica oleracea
MSLNNRDPLVVGGVIGDVLEQFTRSIDLRVTYGQREVTNGLDIRPSQILNKPRVEIGGDDLRNFYTLVMVVPDVPSPSNPHLREYLHWLVTDIPATTGTNFGNEIVSYENPRPTSGIHRIVLVLFRQLGRQTVYEPGWRPQFNTREFAALYNLGLPAAAVYFNCQRDNGCGGRRS

SEQ ID NO: 121 - protein, 175 aa, Brassica oleracea
MSINIRDPLVVGGVIGDVLEQFTRSIDLRVTYGQREVTNGLDIRPSQILNKPRVEIGGDDLRNFYTLVMVVPDVPSPSNPHLREYLHWLVTDIPATTGTNFGNEIVSYENPRPTSGIHRIVLVLFRQLGRQTVYEPGWRPQFNTREFAALYNLGLPAAAVYFDCQRDSGCGGRRL

SEQ ID NO: 122 - protein, 177 aa, Brassica oleracea var. oleracea
MSREIEPLIVGRVIGDVIEMFNPSVTMRVTYNSNTVVSNGHELAPSVLLSRPRVEIGGHDLRSFFTLIMMDPDAPSPSNPYMREYLHWMVTDIPGTTDASFGREMVRYETPKPVIGIHRYAFVLFRQRGRQTVKAAPATRECFNTRDFSAFFGLSLPVAAVYFNAQRETAPRRRPSY

SEQ ID NO: 123 - protein, 175 aa, Brassica oleracea var. oleracea
MSVNNRDPLVVGGVIGDVLERFTRSIDLRVTYGQREVTNGLDIRPSQILNKPRVEIGGEDLRNFYTLVMVDPDVPSPSNPHLREYLHWLVTDIPATTGTNFGNEIVSYENPRPTSGIHRIVLVLFRQLGRQTVYEPGWRPQFNTREFAALYNLGLPAAAVYFNCQRDNGCGGRRS

SEQ ID NO: 124 - protein, 175 aa, Brassica oleracea var. oleracea
MSLSPRDPLVLARVVGDVVDPFMRLISLRVNYGQRQVTNGLDLRTSQVLNKPTVEIGGDDLRNFYTLVMVDPDVPSPSNPHLREYLHWLVTDIPATTGTAFGNELVHYENPCPTSGIHRVALMLFWQLGRQTVYAPEWRQRFNTREFAENYNLGLPVAAVFFNCQRENGWGGRRT

SEQ ID NO: 125 - protein, 175 aa, Brassica oleracea var. oleracea
MSLSPRDPLVLARVVGDVVDPFMRLISLTVNYGQRQVTNGLDLRTSQVLNKPTVEIGGDDLRNLYTLVRLSPDVPSPSNPHLREYLHWLVTDIPATTGTAFGNELVHYENPCPNSGIHRVALMLSRQLRRQTVYAPEWRQRFNTRAFAENNNLGLPVAAVFFNCQRDNGCGGRRT

SEQ ID NO: 126 - protein, 207 aa, Brassica rapa
MAHSKETSINHNTHYTIEKSCSNKRKKRSIMSREIEPLIVGRVIGDVIEMFNPSVTMRVTYNSNTVVSNGHELAPSLLLSRPRVEIGGHDLRSFFTLIMMDPDAPSPSNPYMREYLHWMVTDIPGTTDASFGREMVRYETPKPVIGIHRYAFVLFRQRGRQTVKAAPATRECFNTRDFSAFFGLSLPVAAVYFNAQRETAPRRRPSY

SEQ ID NO: 127 - protein, 177 aa, Brassica rapa
MSREIEPLIVGRVIGDVIEMFNPSVTMRVTYNSNTVVSNGYELAPSLLLSRPRVEIGGHDLRSFFTLIMMDPDAPSPSNPYMREYLHWMVTDIPGTTDASFGREMVRYETPKPVIGIHRYAFVLFRQRGRQTVKAAPATRECFNTRDFSAFFGLSLPVAAVYFNAQRETAPRRRPSY

SEQ ID NO: 128 - protein, 175 aa, Brassica rapa
MSLSNRDPLVVGRVVGDVLECFTRSIDLRVTYGQREVTNGLDLRPSQVLNKPRVEIGGEDLRNFYTLVMVDPDVPSPSNPHLREYLHWLVTDIPATTGTNFGNEIVSYESPRPNSGIHRIVLVLFRQLGRQTVYEPGWRQQFNTREFASLYNLGLPVAAVFYNCQRESGCGGRRS

SEQ ID NO: 129 - protein, 175 aa, Brassica rapa
MSVNNRDPLVVGGVIGDVLERFTRSIDLRVTYGQREVTNGLDIRPSQIINKPRVEIGGEDLRNFYTLVMVDPDVPSPSNPHLREYLHWLVTDIPATTGTNFGNEIVSYESPRPTSGIHRLVLVLFRQLGRQTVYEPGWRPQFNTREFAALYNLGLPVAAVYFNCQRDNGCGGRRT

SEQ ID NO: 130 - protein, 176 aa, Brassica rapa
MSLSPRDPLIVGRVVGDVVDPFMRLISLNVTYGQRQITNGMDLRSSQVLNKPTVEIGGDDLRNFYTLVMVDPDVPSPSNPYLREYLHWLVTDIPATTGTSFGNELVYYENPCPTSGIHRVALILFRQLGRQTVYAPQWRQRFNTREFAENYNLGLPVAAVYFNCQRENGCGGRRTS

SEQ ID NO: 131 - protein, 172 aa, Cajanus cajan
MSRLMEPLAVGRVIGEVVDIFTPSVRMNVTYSTKQVANGHELMPSTIVAKPRVEIGGDDMRTAYTLIMTDPDAPSPSDPYLREHLHWMVTDIPGTTDVSFGKEIVGYESPKPVIGIHRYVFILFKQRGRQTVRPPSSRDYFNTRRFSEENGLGLPVAAVYFNAQRETAARRR

SEQ ID NO: 132 - protein, 176 aa, Cajanus cajan
MSRLMEPLAVGRVIGEVVDIFTPSVRMNVTYSTKQVANGHELMPSTIVAKPRVEIGGDDMRTAYTLIMTDPDAPSPSDPYLREHLHWMVTDIPGTTDVSFGKEIVGYESPKPVIGIHRYVFILFKQRGRQTVRPPSSRDYFNTRRFSEENGLGLPVAAVYFNAQRETAARRRVWHG

SEQ ID NO: 133 - protein, 177 aa, Camelina sativa
MSREIEPLVVGRVIGDVLEMFNPSVTMRVTFSSNTIVSNGHELAPSLLQSKPRVEVGGQDLRSFFTLIMIDPDAPSPTNPYMREYLHWMVTDIPGTTDASFGREIVRFESPKPVAGIHRYVFVLFKQSGRQTVKAAPETRECFNTNAFSSYFGLSLPVTAVYFNAQRETAPRRRSSY

SEQ ID NO: 134 - protein, 177 aa, Camelina sativa
MSREIDPLVVGRVIGDVLEMFNPSVTMRVTFSSNTIVSNGHELAPSLLQSKPRVEVGGQDLRSFFTLIMIDPDAPSPSNPYMREYLHWMVTDIPGTTDASFGREIVRYEAPKPVAGIHRYIFVLFKQSGRQTVSAAPETRECFNTNAFSSYFGLSLPVAAVYFNAQRETAPRRRSSY

SEQ ID NO: 135 - protein, 177 aa, Camelina sativa
MSREIDSLVVGRVVGDVIEMFNPSVTMRVTFSSNTIVSNGHELAPSLLQSKPRVEVGGQDLRSFFTLIMIDPDAPSPSNPHMREYLHWMVTDIPGTTDASFGREIVRYEAPKPVAGIHRYIFVLFKQSGRQTVSAAPETRECFNTNAFSSYFGLSLPVAAVYFNAQRETAPRRRSFY

SEQ ID NO: 136 - protein, 177 aa, Capsella rubella
MSREIEPLIVGRVIGDVLDLFNPSVTMRVTFSSNTIVSNGHELAPSLLLSKPRVEIGGQDLRSFFTLIMMDPDAPSPSNPYMREYLHWMVTDIPGTTDASFGREIVRYETPRPVAGIHRYVFVLFKQSRRQTVKAAPETRECFNTKAFSSYFGLSLPVAAVYFNAQRETAPRRRPSY

SEQ ID NO: 137 - protein, 175 aa, Capsicum annuum
MSSRGACEPLAVGRVIGEVVDSFNPSVKMKVIYNGSKQVSNGHELMPAIIAAQPRVEIGGEDMRCAYTLIMTDPDAPSPSDPYLREHLHWIVTDIPGTTDVSFGREIICYETPKPIIGIHRYVFLLYKQRGRQTVKAPTTRDQFNTRRFSVENGLGSPVAAVYFNAQRETAARRR

SEQ ID NO: 138 - protein, 175 aa, Capsicum baccatum
MSSRGACEPLAVGRVIGEVVDSFNPSVKMKVIYNGSKQVSNGHELMPAIIAAQPRVEIGGEDMRCAYTLIMTDPDAPSPSDPYLREYLHWIVTDIPGTTDVSFGREIMCYETPKPIIGIHRYVFLLYKQRGRQTVKSPTTRDQFNTRRFSAENGLGSPVAAVYFNAQRETAARRR

SEQ ID NO: 139 - protein, 175 aa, Capsicum chinense
MSSRGACEPLAVGRVIGEVVDSFNPSVKMKVIYNGSKQVSNGHELMPAIIAAQPRVEIGGEDMRCAYTLIMTDPDAPSPSDPYLREHLHWIVTDIPGTTDVSFGREIICYETPKPIIGIHRYVFLLYKQRGRQTVKAPTIRDQFNTRRFSVENGLGSPVAAVYFNAQRETAARRR

SEQ ID NO: 140 - protein, 169 aa, Carica papaya
MEPLTIGRVIGEVVDVFTPSVKMTVTYNSNKQVANGHELMPSVIAAKPRVEIGGDDMRSAYTLIMTDPDAPSPSDPYLREHLHWMVTDIPGTTNASFGRDIISYETPKPVVGIHRYAFILFKQKGRRTVRPPASRDHFNTRSFSAENGLGLPVAAVYFNAQRETAARRR

SEQ ID NO: 141 - protein, 174 aa, Cephalotus follicularis
MSRVMEPLIVGRVIGEVVDNFTPSVKMDITYNSDKRVANGHELRPSVITARPRVDIGGEDMRAAYTLVMTDPDAPSPSDPYLREHLHWMVTDIPGTTDASFGKELYSYEAPKRPVVGIHRYVFILFKQRGRQTVSPPASRDLFNTRTFSEVNGLGLPVAAVYFNAQRETAARKR

SEQ ID NO: 142 - protein, 174 aa, Chenopodium quinoa
MARGVEPLIIGRVIGEVVDIFNPSVRLDVTYNSSKQVSNGHELMPAVVTSKPRVEIGGEDMRSAYTLIMVDPDAPSPSDPYLREHLHWIVTDIPGTTDITFGKEIVCYETPKPVVGIHRYIFILFKQTRGRQTVRTPSSRDCFNTRRFAAENGLGLPVAVVYFNAQRETAARRR

SEQ ID NO: 143 - protein, 174 aa, Chenopodium quinoa
MARGVEPLIIGRVIGEVVDIFNPSVRLDVTYNSSKQVSNGHELMPAVVASKPRVEIGGEDMRSSYTLIMVDPDAPSPSDPYLREHLHWIVTDIPGTTDITFGKEIVCYETPKPVVGIHRYIFILFKQTRGRQTVRTPSSRDCFNTRRFAAENGLGLPVAVVYFNAQRETAARRR

SEQ ID NO: 144 - protein, 172 aa, Cicer arietinum
MSRSLEPLSMGRVIGEVVDIFNPSVRMNVTYSTKQVANGHELLPSIVMNKPRVEIGGDDLRTAYTLIMTDPDAPSPSDPYLREHLHWMVTDIPGTTDVSFGKEIVEYENPKPVIGIHRYVFILFKQRGRQTVRSPTFRDNFNTRSFSQQNSLGLPVAAVYFNAQRETAARRR

SEQ ID NO: 145 - protein, 176 aa, Coffea canephora
MSRLLEPLAVGRVIGEVVDSFTPSVKMNITYNGNKQVCNGHELMPAVIVAKPRVEVGGQDMRDAFTLIMTDPDVPGPSDPYLREHLHWLVTIVTDIPGTTDTSFGKEIASYETPKPVIGIHRYVFILYKQKARQAVKPPATRDQFNTRSFAEENGLGSPVAALYFNAQRETAARRR

SEQ ID NO: 146 - protein, 174 aa, Corchorus capsularis
MSRSVHEPLSIGRVIGEVVDYFTPSVKLIVTYNSNKQVANGHELMPAVISARPRVEIGGDDMRAAYTLIMTDPDAPSPSDPYLREHLHWMVTDIPGTTDASFGREVVGYETPKPIVGIHRYVFVLFKQRGRQTVRPPSSRDYFNTRSFSEENGLGLPVAAVYFNAQRETAARRR

SEQ ID NO: 147 - protein, 174 aa, Corchorus olitorius
MSRSVLEPLSIGRVIGEVVDYFTPSVKLIVTYNSNKQVANGHELMPALISARPRVEIGGDDLRSAYTLIMTDPDAPSPSDPYLREHLHWMVTDIPGTTDASFGREVVGYETPKPTVGIHRYVFVLFKQRGRQTVRPPSSRDYFNTRSFSEENGLGLPVAAVYFNAQRETAARRR

SEQ ID NO: 148 - protein, 173 aa, Cynara cardunculus var. scolymus
MSRMIEPLAVGRVIGEVVDTFTPSVKMNITYNLNNTVSNGHELMPNLITSKPRVDIGGEDMRSAYTLIMTDPDVPGPSDPYLREHLHWIVTDIPGTTDASFGREIVSYETPKPVIGIHRYVFLLLKQKSRKSVTPPASRDHFNTRTFCQEHGLGLPVAAVYFNAQRENAARRR

SEQ ID NO: 149 - protein, 175 aa, Daucus carota subsp. sativus
MSRMIEPLAAGRVVGEVVDIFSPSVKMKVTYNSNKLVCNGHELMPSVITWRPRVEIGGQDLREAYTLIMTDPDAPSPSDPYLKEHIHWIVTDIPGTTDVSFGREVLSYETPKPVIGIHRYVFVLFKQRGRHAVNGAPSSRDNFSTRCFSEEYGLGLPVAAVYFNAQRETAARRRS

SEQ ID NO: 150 - protein, 173 aa, Durio zibethinus
MSRVPEPLTIGRVIGEVVDNFSPSVKMTVTYNSNKQVANGHELMPAVITARPRVEIGGEDMRAAYTLIMTDPDAPSPSDPYLREHLHWMVTDIPGTTDASFGREVASYETPKPTVGIHRYVFILFKQRGRQTVRPPSSRDYFNTRRFSAENGLGLPVAAVYFNAQRETAARRR

SEQ ID NO: 151 - protein, 173 aa, Durio zibethinus
MSRVPEPLTIGRVIGEVVDNFSPSVKMTVTYNSNKQVANGHELMPAVITAKPRVEIGGEDMRASYTLIMTDPDAPSPSDPYLREHLHWMVTDIPGTTDDSFGREVVSYETPKPTVGIHRYVFVLFKQRGRQTVRPSSSRDYFNTRRFSDENGLGLPVAAVYFNAQRETAARRR

SEQ ID NO: 152 - protein, 173 aa, Durio zibethinus
MSRVPEPLTIGRVVGEVVDNFFPSVKMTVAYNSNKQVANGHELMPAVITARPRVEIGGEDMRAAYTLIMTDPDAPSPSDPYLREHLHWMVTDIPGTTDASFGNEVVSYETPKPTVGIHRYVFILFKQRGRQTVRPPSSRNYFNTRRFSDENGLGLPVAAVYFNAQRQTAARRR

SEQ ID NO: 153 - protein, 175 aa, Eutrema japonicum
MSISPRDPLVVGRVVTDVLEPFTRSISLRVTYVQRVVTNGLDLRPSQLLNKPRVEIGGEDLRNFYTLVMVDPDVPSPSNPHLREYLHWLVTDIPATTGTNFGNEIVSYESPRPTSGIHRIVLVLFRQLGRQTVYEPGWRQHFNTREFAAIYNLGLPVAAVFFNCQRESGCGGRRS

SEQ ID NO: 154 - protein, 177 aa, Eutrema salsugineum
MSREIEPLIVGRVIGDVIEIFNPSVNMRVTFNTNTVVSNGHELVPSLLLSKPRVEIGGHDLRSFFTLIMMDPDAPSPSNPYMREYLHWMVTDIPGTTDASFGREMVRYETPKPVIGIHRYVFVLFRQRGRQTVKEAPATRECFNTRDFSSFFGLSLPVAAVYFNAQRETAPRRRPSY

SEQ ID NO: 155 - protein, 175 aa, Eutrema salsugineum
MSLSRGDPLVVGRVIGDVLDPFTRLVSLRVTYGQREVTNGLDLRPSQVLNKPTVEIGGEDLRNFYTLVMVDPDFPSLSNPHLREYLHWLVTDIPATTGTTFGNEMLCYENPRPTSGIHRLVLILYRQLGRQTVYAPEWRQQFNTREFAEIYNLGHPVAVSFFNCQRENGCGGRRT

SEQ ID NO: 156 - protein, 175 aa, Eutrema salsugineum
MSLSPSDPLVLGRVVGDVVDPFTRLISLRVTYGHRQVTNGIDIRSSQIVNKPTVEIGGDDLRNFYTLVMVDPDVPSPSNPHLREYLHWLVTDIPATTGTAYGNEIVCYENPRPNSGIHRVVLILFRQLGRHTVYAPEWRQRFNTREFAENYNLGLPVAAVFFNCQRENGCGGRRM

SEQ ID NO: 157 - protein, 174 aa, Eutrema salsugineum
MSHARDPLVVGRVVPDVLELFTRSISLRVTYGQREVTNGLDLRPSQVLNKPRVDIGGEDLRNFYTLVMVDPDVPSPSNPHLREYLHWLVTDIPATTGTNFGNEIVSYESPRPTSGIHRIVLVLFRQLGRQTVYEPGWRQNFNTREFAAIYNLGLPVAAVFFNCQRESGCGGRRS

SEQ ID NO: 158 - protein, 173 aa, Ficus carica
MSRILEPLSVGRVVGEVVDNFTASVKMTVVYNSNKQVANGHEIMPSVIASKPRVEIGGDDLRAAYTLIMTDPDAPSPSNPHLREHLHWLVTDIPGTTDASFGKEIVSYESPKPVVGIHRYVFILFKQKGRQTVTCPASRDYFNTRTFSDENNLGLPVAAVYFNAQRETAARRK

SEQ ID NO: 159 - protein, 172 aa, Glycine max
MSRLMEPLVVGRVIGEVVDIFSPSVKMNVTYSTKQVANGHELMPSTIMAKPRVEIGGDDMRTAYTLIMTDPDAPSPSDPCLREHLHWMVTDIPGTTDVSFGKEIVGYESPKPVIGIHRYVFILFKQRGRQTVRPPSSRDHFNTRRFSEENGLGLPVAAVYFNAQRETAARRR

SEQ ID NO: 160 - protein, 174 aa, Gossypium arboreum
MSRVPDPLIIGRVIGEVVDNFFPSVKITVTYNSNKQVANGHELMPALITARPRVEIGGDDMRPSYTLIMTDPDAPSPSDPYLREHLHWMVTDIPGTTDASFGREVISYETPKPTVGIHRYVFVLFKQRGRQTVRPPSSRDCFNTRRFSADNGLGLPVAAVYFNAQRETAARSRR

SEQ ID NO: 161 - protein, 174 aa, Gossypium barbadense
MSRVPDPLIIGRVIGEVVDNFFPSVKITVTYNSNKQVANGHELMPALITGRPRVEIGGDDMRPSYTLIMTDPDAPSPSDPYLREHLHWMVTDIPGTTDASFGREVVSYETPKPTVGIHRYVFVLFKQRGRQTVRPPSSRDCFNTRRFSADNGLGLPVAAVYFNAQRETAARSRR

SEQ ID NO: 162 - protein, 174 aa, Gossypium hirsutum
MSRVPDPLIIGRVIGEVVDNFFPSVKITVTYNSNKQVANGHELMPALITARPRVEIGGDDMRPCYTLIMTDPDAPSPSDPYLREHLHWMVTDIPGTTDASFGREVISYETPKPTVGIHRYVFVLFKQRGRQTVRPPSSRDCFNTRRFSADNGLGLPVAAVYFNAQRETAARSRR

SEQ ID NO: 163 - protein, 174 aa, Gossypium hirsutum
MSRVPDPLIIGRVIGEVVDNFFPSVKKTVTYNSNKQVANGHELMPALITGRPRVEIGGDDMRPSYTLIMTDPDAPSPSDPYLREHLHWMVTDIPGTTDASFGREVVSYETTKPTVGIHRYVFVLFKQRGRQTVRPPSSRDCFNTRRFSADNGLGLPVAAVYFNAQRETAARSRR

SEQ ID NO: 164 - protein, 174 aa, Gossypium raimondii
MSRVPDPLIIGRVIGEVVDNFFPSVKITVTYNSNKQVANGHELMPALITGRPRVEIGGDDMRPSYTLIMTDPDAPSPSDPYLIEHLHWMVTDIPGTTDASFGREVVSYETPKPTVGIHRYVFVLFKQRGRQTVRPPSSRDCFNTRRFSADNGLGLPVAAVYFNAQRETAARSRR

SEQ ID NO: 165 - protein, 173 aa, Gossypium raimondii
MSRVPEPLTVGRVIGEVVDNFTPSVQMTVTYNPNKQVANGHELMPAAISARPRVEIGGNDMRDAYTLIMTDPDAPSPSDPFLREHLHWMVTDVPGTTDVSFGREVVSYETPNPAVGIHRYVFILFKQRGRRTVKSPSSRDYFNTRRFSAENGLGLPVAAVYFNAQRETAARRR

SEQ ID NO: 166 - protein, 173 aa, Helianthus annuus
MSRMIEPLALGRVIGEVVDTFTPSVKLNVTYNPNKTVSNGHELMPNLIITKPHVDIGGEDMRSAYTLIMTDPDVPGPSDPYLREHLHWIVTDIPGTTDTSFGREIVSYETPKPVIGIHRYVFLLFKQKTRKSVSPPASRDRFNTRSFSQEHGLGLPVAAVYFNAQRENAARRR

SEQ ID NO: 167 - protein, 173 aa, Herrania umbratica
MSRVPEPLTIGRVIGEVVDNFSPSVKMTVTYNSNKQVANGHELMPAVVAARPRVEIGGEDMRAAYTLILTDPDAPSPSDPYLREHLHWMVTDIPGTTDASFGREVVSYETPKPTVGIHRYVFILFKQRGRQTVRPPTSRDYFNTRSFSQENGLGLPVAAVFFNAQRETAARRR

SEQ ID NO: 168 - protein, 173 aa, Hydrangea macrophylla
MSRVMEPLTVGRVVGEVVDPFTPSVRMSVTYNSNKQVSNGYELMPPVIAARPRVEIGGDDLRAAYTLIMTDPDAPSPSDPHLREHLHWIVTDIPGTTDASFGREIVSYETPKPVIGIHRYVFILFKQRSRQIVKPPPSRDHFNTRDFSEEFGLGLPVAALYFNAQRETAARRR

SEQ ID NO: 169 - protein, 174 aa, Ipomoea nil
MSRGVLEPLTVGRVIGEVVDNFIPSVRMNVTYNSNRQVYNGHELMPPLIAAKPRVEIGGDDLRAAYTLIMTDPDAPGPSDPYLREHLHWIVTDIPGTTDVSFGREIVSYEAPKPVIGIHRYVFLLFKQRARHSVRAPPSRDRFNTRAFCQEHGLGTPVAAVYFNAQRETAARRR

SEQ ID NO: 170 - protein, 175 aa, Jatropha curcas
MSRATEPQPLTVGRIIGEVVDAFTPSVKMSVTYNPNRQVANGHELMPSVIAAKPRVEIGGQDLRTSYTLIMTDPDAPSPSDPHLREHIHWMVTDIPGTTDVSFGKEIVSYESPKPVVGIHRYVFLLFKQRGRQTVRPPISRDYFNTRRFAEENGLGLPVAAVYFNAQRETAARRR

SEQ ID NO: 171 - protein, 176 aa, Jatropha curcas
MPRDQFRDPLVVGRVIGDVLDPFTKSISLQVTYNHREVNNGCELKPSQVVNQPRVDIGGDDLRTFYTLVMVDPDAPSPSDPNLREYLHWLVTDIPATTGVTFGQEIVCYESPRPSLGIHRFVFILFRQLGRQTVYPPGWRQNFNTRDFAELYNLGSPVAAVYFNCQRESGTGGRRR

SEQ ID NO: 172 - protein, 173 aa, Juglans regia
MSRFMEPLIVGRVVGEVVDIFTPSLRMNVIYNSTKEVANGHELMPSVIISKPRVEIDGEDMRTAYTLIMTDPDAPSPSDPYLREHLHWMVTDIPGTTDASFGKETVGYETPKQVVGIHRYVFLLFKQSGRQTVRTPATRDHFNTRRFSEENGLGLPVAAVYFNAQRETASRRR

SEQ ID NO: 173 - protein, 173 aa, Juglans regia
MSKLMEPLTVGRVVGEVVDSFTPSVRMNVIYNSSKKVANGHELMPSVIISKPRAEIGGDDMRIAYTLIMTDPDAPTPSDPYLREHLHWMVTDIPGTTDASFGKETVAYESPKPAVGIHRYVFLLFKQRGRQTVRPPATRDHFNTRKFSEENGLGLPVAAVYFNAQRETAARRR

SEQ ID NO: 174 - protein, 173 aa, Lactuca sativa
MSRMIEPLVVGRVIGEVVDTFTPSVKMSVTYNLNKTVSNGHELMPNLITSNPRVNIGGEDMRSAYTLIMTDPDVPGPSDPYLREHLHWIVTDIPGTTDASFGREIVSYETPKPVIGIHRFVFLLFKQKARKSVTPPASRDHFNTRTFCQEHGLGLPVAAVYFNAQRENAARRR

SEQ ID NO: 175 - protein, 173 aa, Liriodendron tulipifera
MARMLEPLIVGRVIGDVLDSFNPSVKMSVTYNSNKQVCNGHELYPSSVVSKPRVEVQGGDMRSFFTLVLTDPDVPGPSDPYLREHLHWIVTDIPGTTDATFGREVVGYEIPRPNIGIHRFVFVLFKQKRRQAVTPPHSRDHFNTRRFAIENDLGLPVAAVYFNAQRETAARRR

SEQ ID NO: 176 - protein, 173 aa, Malus domestica
MSRTTEPLTVGRVIGEVVDIFTPSVKLNVVYNPNKQVANGHELMPSVIAEKPRVDIGGDDMRIAYTLIMTDPDYPGPSDPYLKEHLHWMVTDIPGTTDVSFGKETVEYETPKPVVGIHRYVFLLFKQRGRQTVRAPASRDNFNTRKFSQENGLGLPVAAVYFNAQRETAARRR

SEQ ID NO: 177 - protein, 173 aa, Manihot esculenta
MSRPMEPLAVGRVVGEVVDSFTPSVRMVITYHSNKQVANGYEFMPSFVATRPRVEIGGEDLRTAYTLIMTDPDAPSPSDPHLREHLHWMVTDIPGTTDASFGREVVSYETPKPVVGIHRYVFILFKQRGRQTVSPPASRDHFNTRRFSEENGLGLPVAAVYFNAQRETAARRR

SEQ ID NO: 178 - protein, 172 aa, Medicago truncatula
MSRPLEPLSVGRVIGEVVDIFNPSVRMNVTYSTKQVANGHELMPSIVMNKPRVDIGGEDMRSAYTLIMTDPDAPSPSDPHLREHLHWMVTDIPGTTDVSFGNEIVEYENPKPVIGIHRYVFILFKQRGRQTVRSPSSRDNFNTRRFSQENNLGLPVAAVYFNAQRETAARRR

SEQ ID NO: 179 - protein, 198 aa, Mucuna pruriens
MPSKSLTSHIPSYTKFYPSQFSLQLMSRLMEPLSVGRVIGEVVDIFSPSVRMNVTYSTKQVANGHELMPSTIMAKPRVEIGGDDMRTAYTLIMTDPDAPSPSDPYLREHLHWMVTDIPGTTDVSFGKEIVGYESPKPVIGIHRYVFILFKQRGRQTVRSPSSRDHFNTRRFSEENGLGLPVAAVYFNAQRETAARRRQ

SEQ ID NO: 180 - protein, 173 aa, Nelumbo nucifera
MARILEPLTVGRVVGEVVDFFTPSVKMTVTYYSNKQVCNGHELMPSVITSRPRVEIGGEDLRAAYTLIMTDPDAPSPSGPYLREHLHWIVTDIPGTTDSSFGREIVEYETPKPVIGIHRFVFILFKQRGRQTVKPPASRDHFNTRKFSEENGLGLPVAAVYFNAQRETAARRR

SEQ ID NO: 181 - protein, 173 aa, Nelumbo nucifera
MERNLEPLTVGRVVGEVVDAFTPSVKMNVTYNFNKQVYNGHEFMPSVITSRPRVEIGGEDLRAAFTLIMTDPDAPSPSDPYLREHLHWIVTDIPGTTDASFGREIVGYETPKPVIGIHRFVFILFKQKGRKTVKPPASRDQFSTRKFSEENGLGLPVAAVYFNAQRETAARRR

SEQ ID NO: 182 - protein, 174 aa, Nicotiana attenuata
MSSRASESLAVGRVIGEVVDSFTACVQMNVIYNGSKQVSNGHELMPALVASKPRVEIGGEDLRSAYTLIMTDPDAPSPSDPYLREHLHWIVTDIPGTTDVSFGREIVSYESPKPVIGIHRYAFILYKQRGRQTVKLPATRDQFNTRSFAAENGLGSPVAAVYFNAQRETAARRR

SEQ ID NO: 183 - protein, 174 aa, Nicotiana sylvestris
MSSRASESLAVGRVIGEVVDSFTACVKMNVIYNGSKHVSNGHELMPALIASKPRVEIGGEDMRSAYTLIMTDPDAPSPSDPYLREHLHWIVTDIPGTTDVSFGREIVSYESPKPVIGIHRYVFILYKQRGRQTVKLPATRDQFNTRSFAAENGLGSPVAAVYFNAQRETAARRR

SEQ ID NO: 184 - protein, 174 aa, Nicotiana tomentosiformis
MTSRVVEPLVVARVIGEVVDSFNPSVKMNVIYNGSNQVFNGHELMPAVIAAKPRVEIGGEDMRSAYTLIMTDPDVPGPSDPYLREHLHWIVTDIPGSTDASFGREIVSYESPKPVIGIHRYVFLLYKQSGRQTVEPAATRDHFNTRRFTAENGLGSPVAAVYFNAQRETAARRR

SEQ ID NO: 185 - protein, 173 aa, Oryza brachyantha
MSRSVEPLVVGRVIGEVLDTFNPCMKMIVTYNSNKLVFNGHELYPSAVVSKPRVEVQGGDLRSFFTLVMTDPDVPGPSDPYLREHLHWIVTDIPGTTDASFGREVISYESPKPNIGIHRFIFVLFKQKRRQTVLVPSFRDHFNTRRFAEENDLGLPVAAVYFNAQRETAARRR

SEQ ID NO: 186 - protein, 173 aa, Oryza sativa Japonica Group
MSRSVEPLVVGRVIGEVIDSFNPCTKMIVTYNSNKLVFNGHEFYPSAVVSKPRVEVQGGDMRSFFTLVMTDPDVPGPSDPYLREHLHWIVTDIPGTTDASFGREIISYESPKPSIGIHRFVFVLFKQKRRQAVVVPSSRDHFNTRQFAEENELGLPVAAVYFNAQRETAARRR

SEQ ID NO: 187 - protein, 173 aa, Oryza sativa Japonica Group
MSRSVEPLVVGRVIGEVLDTFNPCMKMIVTYNSNKLVFNGHELYPSAVVSKPRVEVQGGDLRSFFTLVMTDPDVPGPSDPYLREHLHWIVTDIPGTTDASFGREVISYESPKPNIGIHRFIFVLFKQKRRQTVIVPSFRDHFNTRRFAEENDLGLPVAAVYFNAQRETAARRR

SEQ ID NO: 188 - protein, 174 aa, Oxybasis rubra
MARGVEPLIIGRVIGEVVDIFNPSVKLDVTYNSSKQVSNGHELMPAVIVSKPRVEIGGEDMRSAYTLIMVDPDAPSPSDPYLREHLHWIVTDIPGTTDITFGKEIVCYETPKPVVGIHRYIFILFKQTRGRQTVRAPSSRDCFNTRRFAAENGLGLPVAVVYFNAQRETAARRR

SEQ ID NO: 189 - protein, 173 aa, Paeonia suffruticosa
MPRNRDPLVVGRVVGDVLDPFTRTISLRVTYTSREVSNGCELKPSQVVNQPRVDIGGDDLRTFYTLVMVDPDAPSPSDPNLREYLHWLVTDIPATTGANFGQEIVCYESPRPTAGIHRFCFILFRQLGRQTVYTPGWRQNFNTRDFAELYNLGSPVAAVYFNCQRERGSGGRR

SEQ ID NO: 190 - protein, 173 aa, Panicum hallii
MSRSVEPLVVGRVIGEVLDSFNPCVKMIVTYNSNKLVCNGHEIYPSAVVSKPRVEVQGGDLRSFFTLVMTDPDVPGPSDPYLREHLHWIVTDIPGTTDASFGREVISYESPRPNIGIHRFIFVLFKQKRRQTVTVPSIRDHFNTRQFAEENDLGLPVAAVYFNAQRETAARRR

SEQ ID NO: 191 - protein, 173 aa, Panicum miliaceum
MSRSVEPLVVGRVIGEVLDSFNPCVKMIVTYNSNKLVFNGHEIYPSAVVSKPRVEVQGGDLRSFFTLVMTDPDVPGPSDPYLREHLHWIVTDIPGTTDASFGREVISYESPRPNIGIHRFIFALFKQKRRQTVTVPSFRDHFNTRQFAEENDLGLPVAAVYFNAQRETAARRR

SEQ ID NO: 192 - protein, 173 aa, Panicum miliaceum
MSRSVEPLVVGRVIGEVLDSFNPCVKMIVTYNSNKLVFNGHEIYPSAVVSKPRVEVQGGDLRSFFTLVMTDPDVPGPSDPYLREHLHWIVTDIPGTTDASFGREVISYESPRPNIGIHRFIFVLFKQKRRQTVTVPSIRDHFNTRQFAEENDLGLPVAAVYFNAQRETAARRR

SEQ ID NO: 193 - protein, 173 aa, Parasponia andersonii
MSRVIEPLSIGRVVGDVVDSFTPSVRMRVIYNSNKHVANGHELMPSLLVSKPQVEIGGEDMRAAYTLIMTDPDAPSPSDPYSKEHLHWMVTDIPGTTDVSFGKEIVSYEAPKPVVGIHRFVFILFKQRGRQTVRTPALRDYFNTRAFSGDNNLGLPVAAVYFNAQRETAARRG

SEQ ID NO: 194 - protein, 173 aa, Phoenix dactylifera
MARILEPLIVGRVIGEVLDPFNPSVKMVVTYNSNKLVCNGHEFYPSAVASKPRVEVQGADMRSFFTLVMTDPDVPGPSDPYLREHLHWIVTDIPGTTDASFGREVVSYESPRPNIGIHRFVFVLFKQKRRQAVAPPDSRDNFNTRRFAEENDLGLPVAAVYFNAQRETAARRR

SEQ ID NO: 195 - protein, 174 aa, Punica granatum
MSRIVDPLIVGRVMGDVVEVFTQSVKLTITYGSNKRVSNGHELMPAVFMTKPRVEIGGVDMREAYTLILTDPDAPSPSDPHLREHLHWIVTDIPGTTDASFGREIVSYESPNPVIGIHRYVFVLFKQTRGRQTVRAPISRDHFNTKKFSEDNGLGLPVAVVYFNAQRETAARRR

SEQ ID NO: 196 - protein, 173 aa, Quercus suber
MSRLIETLSVGRVVGEVVDIFTPSIRLNVIYNSNKQVANGHEFKPSVIISKPRVEIGGDDMRTAYTLIMTDPDAPSPSDPSLREHLHWMVTDIPGTTDASFGKEIVSYETPKPVVGIHRYVFILFKQTGRQTVTPPTTRDYFNTRRFSAENGLGLPVAAVYFNAQRETAARRR

SEQ ID NO: 197 - protein, 177 aa, Raphanus sativus
MSREIEPLIVGRVIGDVIEMFNPSVTMRVTYSSNTTVSNGHELAPSLLLSKPRVEIGGHDLRSFFTLIMMDPDAPSPSNPYMREYLHWMVTDIPGTTDASFGREMVRYETPKPVIGIHRYAFVLFRQRGRQTVKAAPATRECFNTRDFSAFFGLSLPVAAVYFNAQRETAPRRRPSY

SEQ ID NO: 198 - protein, 177 aa, Raphanus sativus
MSREIEPLIVGRVIGDVIEMFNPSVTMRVTYSSNTIVSNGHELAPSLLLSKPRVEVGGHDLRSFFTLIMMDPDAPSPSNPYMREYLHWMVTDIPGTTDASFGREMVRYETPKPVIGIHRYAFVLFRQRGRQTVKAAPARRECFNTRDFSAFFGLSLPVAAVYFNAQRETAPRRRPSY

SEQ ID NO: 199 - protein, 175 aa, Raphanus sativus
MSLSNRDPLVVGRVVGDVLECFTRSIDLKVTYGQREVTNGLDLRPSQVLNKPRVEIGGEDLRNFYTLVMVDPDVPSPSNPHLREYLHWLVTDIPATTGTNFGNEIVSYESPRPNSGIHRIVLVLFRQLGRQTVYEPGWRQQFNTREFASLYNLGLPVAAVFYNCQRESGCGGRRS

SEQ ID NO: 200 - protein, 176 aa, Raphanus sativus
MSLSPRDPLVVGRVVGDVVDPFTRLISLKVTYGQREVSNGMDLRSSQVLNKPTVEIGGDDLRNFYTLVMVDPDVPSPSNPYLRGYLHWLVTDIPATTGTAFGNELVCYENPCPTSGIHRVALILFRQLGRQTVYAPQWRQRFNTREFAENYNLGLPVAAVYFDCQRENGCGGRRTS

SEQ ID NO: 201 - protein, 173 aa, Ricinus communis
MSRVMEALAVGRVVGEVVDIFTPSVKLIVTYNANKQVANGHELMPSVLTSKPRVEIGGEDMRTAYTLIMTDPDAPSPSDPNLREHLHWMVTDIPGTTNVSFGKEIVSYETPKPVVGIHRYVFILFKQKGRQTVKAPASRDYFNTRGFSEENKLGLPVAVVYFNAQRETAARRR

SEQ ID NO: 202 - protein, 169 aa, Ricinus communis
MEALAVGRVVGEVVDIFTPSVKLIVTYNANKQVANGHELMPSVLTSKPRVEIGGEDMRTAYTLIMTDPDAPSPSDPNLREHLHWMVTDIPGTTNVSFGKEIVSYETPKPVVGIHRYVFILFKQKGRQTVKAPASRDYFNTRGFSEENKLGLPVAVVYFNAQRETAARRR

SEQ ID NO: 203 - protein, 173 aa, Sesamum indicum
MSRQLDPLSVGRVIGEVVDSFIPCVKLTVTFNSNKQVSNGHELMPSVITSKPRVEIGGEDLRAAYTLVMTDPDVPGPSDPYLREHLHWIVTDIPGTTDASFGREIVSYETPKPVIGIHRYVFLLFRQKARHTVRPPASRDLFNTRRFAEENGLGLPVAAVYFNAQRETACRRR

SEQ ID NO: 204 - protein, 173 aa, Setaria italica
MSRSVEPLIVGRVIGEVLDSFNPCVKMIVTYNSNKLVFNGHEIYPSAVVSKPRVEVQGGDLRSFFTLVMTDPDVPGPSDPYLREHLHWIVTDIPGTTDASFGREVINYESPRPSIGIHRFIFVLFKQKRRQTVTVPSVRDHFNTRQFAEENDLGLPVAAVYFNAQRETAARRR

SEQ ID NO: 205 - protein, 175 aa, Sinapis alba
MSVNHRDPLVVGGVIGDVLERFTRSIDLRVTYGQREVSNGLDIRPSQILNKPRVEIGGEDLRNFYTLVMVDPDVPSPSDPHLREYLHWLVTDIPATTGTNFGNEVVSYENPRPTSGIHRIVMVLFRQLGRQTVYEPGWRPQFNTREFAALYNLGLPVAAVYFNCQRDNGCGGRRS

SEQ ID NO: 206 - protein, 175 aa, Solanum lycopersicum
MSSRSTCEPLAVGRVIGEVVDSFSPSVKMKVIYNGRKQVSNGHEIMPAVVATQPRVEIGGEDMRSAYTLIMTDPDAPSPSDPYLREHLHWIVTDIPGTTDISFGREIVCYETPKPVIGIHRYVFLLYKQRGRQTVRAPATRDQFNTRSFSAENGLGSPVAAVYFNAQRETAARRR

SEQ ID NO: 207 - protein, 175 aa, Solanum pennellii
MSFRSTCEPLAVGRVIGEVVDSFSPSVKMKVLYNGSKQVSNGHEIMPAVVATQPRVEIGGEDMRSAYTLIMTDPDAPSPSDPYLREHLHWIVTDIPGTTDISFGREIVCYEKPKPVIGIHRYVFLLYKQRGRQTVRAPTTRDQFNTRSFSAENGLGSPVAAVYFNAQRETAARRR

SEQ ID NO: 208 - protein, 175 aa, Solanum pennellii
MSCRDIEPLIVAKVIGEVVDSFNPSVKMNVTYNGTKQVFNGHELMPLVIASKPRVEIGGEDMRSAYTLVMIDPDVPGPSDPYLREHLHWIVTDIPGSTDASFGREIVSYESPKPVIGIHRYVFVLYKQNRGRQTVKPPVTRDHFNTRKFAVENGLGSPVAAVYFNAQRETAARRR

SEQ ID NO: 209 - protein, 175 aa, Solanum tuberosum
MSSRGTCEPLAVGRVIGEVVDSFSPSVKMKVIYNGSKQVSNGHEIMPAVVATQPRVEIGGEDMRSAYTLIMTDPDAPSPSDPYLREHLHWIVTDIPGTTDISFGREIVCYETPKPVIGIHRYVFLLYKQRGRQTVKAPSTRDQFNTRSFSAENGLGSPVAAVYFNAQRETAARRR

SEQ ID NO: 210 - protein, 175 aa, Solanum tuberosum
MSCRDIEPLIVARVIGEVVDSFNPSVKMNVIYNGSKQVFNGHELMPPIIASKPRVEIGGEDMRSAYTLIMTDPDVPGPSDPYLREHLHWIVTDIPGSTDASFGKEIVSYDSPKPVIGIHRYVFVLYRQNRGRQTVKSPVTRDHFNTQKFAAENGLGSPVAAVYFNAQRETAARRR

SEQ ID NO: 211 - protein, 173 aa, Sorghum bicolor
MSRSVEPLIVGRVIGEVLDSFNPCVKMIVTYNSNKLVFNGHEIYPSAVVSKPRVEVQGGDLRSFFTLVMTDPDVPGPSDPYLREHLHWIVTDIPGTTDASFGREVISYESPRPNIGIHRFIFVLFKQKGRQTVTVPSSRDHFNTRQFAEENDLGLPVAAVYFNAQRETAARRR

SEQ ID NO: 212 - protein, 174 aa, Spinacia oleracea
MARGVEPLIIGRVIGEVVDIFNPSVTLNVTYNSSKQVANGHELMPAVIVSKPRVEIGGEDMRSAYTLIMVDPDAPSPSDPYLREHLHWIVTDIPGTTDISFGKEIVCYETPKPVVGIHRYIFILFQQTRGRQTVRTPSSRDCFNTRRFAAENGLGLPVAVVYFNAQRETAARRR

SEQ ID NO: 213 - protein, 175 aa, Tarenaya hassleriana
MSREIEPLVVGRVVGDVIERFNPSVTMRVTYNLDKQVANGHELMPSSFIYKPRVEIGGDDMRSFYTLIMVDPDAPSPSDPYLREYLHWMVTDIPGTTDASFGKEIVSYETPKPVVGIHRYVFVLFRQMRGRQTVKLPPPSRQCFNTRGFCAYFGLGLPVAAVYFNAQRETAPRRR

SEQ ID NO: 214 - protein, 173 aa, Theobroma cacao
MSRVPEPLTVGRVIGEVVDNFTPSVKMTVTYNSNKQVANGHELMPAVIVARPRVEIGGEDMRAAYTLILTDPDAPSPSDPYLREHLHWMVTDIPGTTDASFGREVVSYETPKPTVGIHRYVFILFKQRGRQTVRPPTSRDYFNTRTFSQENGLGLPVAAVYFNAQRETAARRR

SEQ ID NO: 215 - protein, 174 aa, Trema orientale
MSRVIEPLSIGRVVGDVVDSFTPNVRMRVIYNSNKHVANGHELMPSLLVSKPHVEIGGEDMRAAYTLIMTDPDAPSPSDPCSKEHLHWMVTDIPGTTDVSFGKEIVSYEAPKPVVGIHRFVFILFKQRGRQTVRTPAMRDYFNTRAFSQDNNLGLPVAAVYFNAQRETAARRHN

SEQ ID NO: 216 - protein, 172 aa, Vigna angularis
MSRLMEPLSVGRVIGEVVDIFSPSVRMNVTYSTKEVANGHELMPSTVMAKPRVEIGGDDMRTAYTLIMTDPDAPSPSDPCLREHLHWMVTDIPGTTDVSFGKEIMGYESPKPVIGIHRYVFILFKQRGRQTVRAPSSRDHFNTRKFSEENGLGLPVAAVYFNAQRETAARRR

SEQ ID NO: 217 - protein, 197 aa, Vigna radiata var. radiata
MPSKSHFSYALLLKVSLLSAVSFQFMSRLMEPLSVGRVIGEVVDIFSPSVRMNVTYSTKEVANGHELMPSTVMAKPRVEIGGDDMRTAYTLIMTDPDAPSPSDPYLREHLHWMVTDIPGTTDVSFGKDIMAYESPKPVIGIHRYVFILFKQRGRQTVRAPSSRDHFNTRRFSQENGLGLPVAAVYFNAQRETAARRR

SEQ ID NO: 218 - protein, 172 aa, Vigna unguiculata
MSRVMEPLSVGRVIGEVVDIFSPSVRMNVTYSTKEVANGHELMPSTVMAKPRVEIGGDDMRTAYTLIMTDPDAPSPSDPYLREHLHWMVTDIPGTTDVSFGKEIMGYESPKPVIGIHRYVFILFKQRGRQTVRAPSSRDRFNTRRFSEENGLGLPVAAVYFNAQRETAARRR

SEQ ID NO: 219 - protein, 173 aa, Zea mays
MSRSVEPLIVGRVIGEVLDSFNPCVKMIVTYNSNKLVFNGHEIYPSAIVSKPRVEVQGGDLRSFFTLVMTDPDVPGPSDPYLREHLHWIVTDIPGTTDASFGREVISYESPRPNIGIHRFIFVLFKQKGRQTVTVPSFRDHFNTRQFAEENDLGLPVAAVYFNAQRETAARRR

SEQ ID NO: 220 - protein, 206 aa, Zea mays
MPNKQLTVFLSAFACSIQSEHFLCKIQIPVTPTMSRSVEPLIVGRVIGEVLDSFNPCVKMIVTYNSNKLVFNGHEIYPSAIVSKPRVEVQGGDLRSFFTLVMTDPDVPGPSDPYLREHLHWIVTDIPGTTDASFGREVISYESPRPNIGIHRFIFVLFKQKGRQTVTVPSFRDHFNTRQFAEENDLGLPVAAVYFNAQRETAARRR

SEQ ID NO: 221 - protein, 173 aa, Zea mays
MSRSVEPLIVGRVIGEVLDSFNPCVKMMVTYNSNKLVFNGHEIYPSAVVSKPRVEVQGGDLRSFFTLVMTDPDVPGPSDPYLREHLHWIVTDIPGTTDASFGRQIISYESPRPSIGIHRFIFVLFKQQGRQNVTVPSFRDHFNTRQFAEENDLGLPVAAVYFNAQRETAARRR

SEQ ID NO: 222 - protein, 173 aa, Zea mays
MSRSVEPLIVGRVIGEVLDSFNPCVKMIVTYNSNKLVFNGHEIYPSAVVSKPRVAVQGGDLRSFFTLVMTDPDVPGPSDPYLREHLHWIVTDIPGTTDASFGRQIISYESPRPSIGIHRFIFVLFKQQGRQNVTVPSFRDHFNTRQFAEENDLGLPVAAVYFNAQRETAARRR

SEQ ID NO: 223 - protein, 172 aa, Actinidia chinensis var. chinensis
MARIAEPLTVGRVIGDVLDVFTPTIKMLVTYNTKQVYNGHELYPSQVTTKPRVEIQGGDMRTFFTLVMTDPDVPGPSDPYLREHLHWIVTDIPGTTDATFGREVVNYEIPRPNIGIHRFVFVLFKQKRRQTVNPPPSRDHFSTRGFAADNDLGPPVAAVYFNAQRETAARRR

SEQ ID NO: 224 - protein, 173 aa, Actinidia chinensis var. chinensis
MAKKSDPLVVGRVIGDVVDNFCGSVKMSVTYNSNKQVYNGHELFPSIITTKPRVEVHGGDMRSFFTLIMTDPDVPGPSDPYLKEHLHWIITDIPGTTDSSFGREVVNYEIPRPNIGIHRFVFVLFKQKRRQAVTPPPSRDHFSTRKFAEENDLGLPVAAVFFNAQRETAARRR

SEQ ID NO: 225 - protein, 173 aa, Actinidia deliciosa
MAKKSDPLVVGRVIGDVVDNFYGSVKMSVTYNSNKRVYNGHELFPSIVTTKPRVEVHGGDMRSFFTLIMTDPDVPGPSDPYLKEHLHWIITDIPGTTDSSFGREVVNYEIPRPNIGIHRFVFVLFKQTSRQSVTPPPSRDQFSTRKFAEENDLSLPVAAVFFNAQRETAARRR

SEQ ID NO: 226 - protein, 181 aa, Antirrhinum majus
MAAKISSDPLVIGRVIGDVVDHFTSTVKMSVIYNANNSIKHVYNGHELFPSAVTSTPRVEVHGGDMRSFFTLIMTDPDVPGPSDPYLREHLHWIVTDIPGTTDSSFGKEVVSYEMPRPNIGIHRFVFLLFKQKKRGQAMLSPPVVCRDGFNTRKFTQENELGLPVAAVFFNCQRETAARRR

SEQ ID NO: 227 - protein, 181 aa, Antirrhinum majus
MAAKISSDPLVIGRVIGDVVDHFTSTVQMSVIYNANNSIKHVYNGHELFPSAVTSTPRVEVHGGDMRSFFTLIMTDPDVPGPSDPYLREHLHWIVTDIPGTTDSSFGKEVVSYEMPRPNIGIHRFVFLLFKQKKRGQAMLSPPVVCRDGFNTRKFTQENELGLPVAAVFFNCQRETAARRR

SEQ ID NO: 228 - protein, 177 aa, Arabidopsis lyrata
MENMGTRVIEPLIMGRVVGDVLDFFTPTIKMNVSYNKKQVSNGHELFPSSVSSKPRVEIHGGDLRSFFTLVMIDPDVPGPSDPFLKEHLHWIVTNIPGTTDATFGKEVVSYELPRPSIGIHRFVFVLFKQKQRRVIFPNIPSRDHFNTRKFAVEYDLGLPVAAVFFNTQRETAARKR

SEQ ID NO: 229 - protein, 177 aa, Arabidopsis lyrata subsp. lyrata
MENMGTRVIEPLIMGRVVGDVLDFFTPTIKMNVSYNKKQVSNGHELFPSSVSSKPRVEIHGGDLRSFFTLVMIDPDVPGPSDPFLKEHLHWIVTNIPGTTDATFGKEVVSYELPRPSIGIHRFVFVLFKQKQRRVIFPNIPSRDHFNTRKFAVEYDLGLPVAAVFFNAQRETAARKR

SEQ ID NO: 230 - protein, 175 aa, Arabidopsis lyrata subsp. lyrata
MARISSDPLMVGRVIGDVVDNCLQAVKMTVTYNSDKQVYNGHELFPSAVTNKPKVEVHGGDMRSFFTLVMTDPDVPGPSDPYLREHLHWVVTDIPGTTDVSFGKEIIGYEMPRPNIGIHRFVYLLFKQNRRGSVVSVPSYRDQFNTREFAHENDLGLPVAAVFFNCQRETAARRR

SEQ ID NO: 231 - protein, 148 aa, Arabidopsis lyrata subsp. lyrata
MTVTYNSDKQVYNGHELFPSAVTNKPKVEVHGGDMRSFFTLVMTDPDVPGPSDPYLREHLHWVVTDIPGTTDVSFGKEIIGYEMPRPNIGIHRFVYLLFKQNRRGSVVSVPSYRDQFNTREFAHENDLGLPVAAVFFNCQRETAARRR

SEQ ID NO: 232 - protein, 177 aa, Arabidopsis thaliana
MENMGTRVIEPLIMGRVVGDVLDFFTPTTKMNVSYNKKQVSNGHELFPSSVSSKPRVEIHGGDLRSFFTLVMIDPDVPGPSDPFLKEHLHWIVTNIPGTTDATFGKEVVSYELPRPSIGIHRFVFVLFRQKQRRVIFPNIPSRDHFNTRKFAVEYDLGLPVAAVFFNAQRETAARKR

SEQ ID NO: 233 - protein, 180 aa, Arabidopsis thaliana
GSHMENMGTRVIEPLIMGRVVGDVLDFFTPTTKMNVSYNKKQVSNGHELFPSSVSSKPRVEIHGGDLRSFFTLVMIDPDVPGPSDPFLKEHLHWIVTNIPGTTDATFGKEVVSYELPRPSIGIHRFVFVLFRQKQRRVIFPNIPSRDHFNTRKFAVEYDLGLPVAAVFFNAQRETAARKR

SEQ ID NO: 234 - protein, 177 aa, Arabidopsis thaliana
MENMGTRVIEPLIIGRVVGDVLDFFTPTTKMNVSYNKKQVSNGHELFPSSVSSKPRVEIHGGDLRSFFTLVMIDPDVPGPSDPFLKEHLHWIVTNIPGTTDATFGKEVVSYELPRPSIGIHRFVFVLFRQKQRRVIFPNIPSRDHFNTRKFAVEYDLGLPVAAVFFNAQRETAARKR

SEQ ID NO: 235 - protein, 177 aa, Arabidopsis thaliana
MENMGTRVIEPLIMGRVVGDVLDFFTPTTKMNVSYNKKQVSNGHELFPSSVSSKPRVEIHGGDLRSFFTLVMIDPDVPGPSDPFLKEHLHWIVTNIPGTTDATFGKEVVSYELPRPSIGIHRFVFVLFRQKQRRVIFPNIPSRDHFNTRKFAVEYDLGLTVAAVFFNAQRETAARKR

SEQ ID NO: 236 - protein, 177 aa, Arabidopsis thaliana
MENMGTRVIEPLIIGRVVGDVLDFFTPTTKMNVSYNKKQVSNGHELFPSSVSSKPRVEIHGGDLRSFFTLVMIDPDVPGPSDPFLKEHLHWIVTNIPGTTDATFGKEVVSYELPRPSIGIHRFVFVLFRQKQRRVIFPNIPSRDHFNTRKFAVEYDLGLPVAAVFFNAQRETAAHKR

SEQ ID NO: 237 - protein, 174 aa, Arabidopsis thaliana
MENMGTRVIEPLIMGRVVGDVLDFFTPTTKMNVSYNKKQVSNGHELFPSSVSSKPRVEIHGGDLRSFFTLVMIDPDVPGPSDPFLKEHLHWIVTNIPGTTDATFGKEVVSYELPRPSIGIHRFVFVLFRQKQRRVIFPNIPSRDHFNTRKFAVEYDLGLPVAAVFFNAQRETAA

SEQ ID NO: 238 - protein, 174 aa, Arabidopsis thaliana
MENMGTRVIEPLIIGRVVGDVLDFFTPTTKMNVSYNKKQVSNGHELFPSSVSSKPRVEIHGGDLRSFFTLVMIDPDVPGPSDPFLKEHLHWIVTNIPGTTDATFGKEVVSYELPRPSIGIHRFVFVLFRQKQRRVIFPNIPSRDHFNTRKFAVEYDLGLPVAAVFFNAQRETAA

SEQ ID NO: 239 - protein, 175 aa, Arabidopsis thaliana
MARISSDPLMVGRVIGDVVDNCLQAVKMTVTYNSDKQVYNGHELFPSVVTYKPKVEVHGGDMRSFFTLVMTDPDVPGPSDPYLREHLHWIVTDIPGTTDVSFGKEIIGYEMPRPNIGIHRFVYLLFKQTRRGSVVSVPSYRDQFNTREFAHENDLGLPVAAVFFNCQRETAARRR

SEQ ID NO: 240 - protein, 177 aa, Arabis alpina
MENIGSRLIEPLIVGRVVGEVLDYFTPTIKMNVSYNKKQVSNGHELFPSTVSSKPRVEIHGGDLRSFFTLVMIDPDVPGPSDPFLKEHLHWIVTNIPGTTDATFGKEVVSYELPRPSIGIHRFVFVLFKQKQRRVIFPNIPSRDHFNTREFAVEYDLGLPVAAVFFNAQRETAARKR

SEQ ID NO: 241 - protein, 175 aa, Arabis alpina
MARISSDPLMVGRVIGDVVDNCLQAVKMTVTYNSDKQVYNGHELFPSAVTNKPKVEVHGGDMRSFFTLVMTDPDVPGPSDPYLREHLHWIVTDIPGTTDVTFGKDIVGYEMPRPNIGIHRFVYLLFKQSRRGSVVSVPSYRDQFNTRMFAYENDLGLPVAAVFFNCQRETAARRR

SEQ ID NO: 242 - protein, 178 aa, Brassica carinata
MENMGTRVIEPLIVGRVVGDVLDNFTPTIKMNVSYNKKQVSNGHELFPLAVSSKPRIEIHDGDLRSFFTLVMTDPDVPNPSDPFLKERLHWLVMNIPGTTDATFGKEVVSYELPKPNIGIHRYVFVLFRQKQRRVKFPSNIISRDQFNTREFAIENDLGLPVAAVFFNAQRETASRRR

SEQ ID NO: 243 - protein, 177 aa, Brassica juncea
MENMGTRVIEPLIMGRVVGDVLDFFTPTIKMNVSYNKKQVSNGHELFPSSVSSKPRVEIHGGDLRSFFTLVMIDPDVPGPSDPFLKEHLHWIVTNIPGTTDATFGKEVVSYELPRPSIGIHRFVFVLFKQKQRRVIFPNIPSRDHFNTRKFAIEYDLGLPVAAVFFNAQRETAARRR

SEQ ID NO: 244 - protein, 177 aa, Brassica juncea
MENMGTRVLEPLIMGRVVGDVLDFFTPTIKMNVSYNKKQVSNGHELFPSSVSSKPRVEIHGGDLRSFFTLVMIDPDVPGPSDPFLKEHLHWIVTNIPGTTDATFGKEVVSYELPRPSIGIHRFVFVLFKQKQRRVIFPNIPSRDHFNTRKFAIEYDLGLPVAAVFFNAQRETAARRR

SEQ ID NO: 245 - protein, 178 aa, Brassica juncea
MENMGTRVIEPLRVGGVVGDVLDNFTPTIKMNVSYNKKQVSNGHELFPSAVSSKPRVEIHDGDLRSFFTLVMTDPDVPNPSDPFLKEHLHWLVMNIPGTTDATFGKEVVSYELPKPNIGIHRYVFVLFRQKQRRVIFPSNILSRDQFNTREFAIENDLGLPVAAVFFNAQRETAARRR

SEQ ID NO: 246 - protein, 178 aa, Brassica juncea
MENMGTRVIEPLRVGGAVGDVLDNFTPTIKMNVSYNKKQVSNGHELFPSAVSSKPRVEIHDGDLRSFFTLVMTDPDVPNPSDPFLKEHLHWLVMNIPGTTDATFGKEVVSYELPKPNIGIHRYVFVLFRQKQRRVIFPSNILSRDKFNTREFAIENDLGLPVAAVFFNAQRETAARRR

SEQ ID NO: 247 - protein, 178 aa, Brassica juncea
MENMGTRVIEPLIVGRVVGDVLDDFTPTIKMNVSYNKKQVSNGHEFLPLAVSSKPRVEIHDGDLRSFFTLVMTDPDVPNPSDPFLKEHLHWLVMNIPGTTDATFGKEVVSYELPKPNIGIHRYVFVLFRQKQRRVIFPSNILSRDQFNTREFAIENDLGLPVAAVFSNAQRETAARRR

SEQ ID NO: 248 - protein, 178 aa, Brassica juncea
MENMGTRVIEPLRVGGVVGDVLDNFTPTIKMNVSYNKKQVSNGHEFLPLAVSSKPRVEIHDGDLRSFFTLVMTDPDVPNPSDPFLKERLHWLVMNIPGTTDATFGKEVVSYELPKPNIGIHRYVFVLFRQKQRRVKFPSNIISRDQFNTREFAIENDLGLPVAAVFFNAQRETASRRR

SEQ ID NO: 249 - protein, 179 aa, Brassica napus
MENMGSRVIEPLIVGRVVGEVLDFFTQTIEMNVSYNKKQVCNGHELFPSFVSSKPRVEIHGGDLRSFFTLVMIDPDVPGPSDPFLKEHLHWIVTNIPGTTDATFGKEVVSYEFPRPNIGIHRFVFVLFKQKQRHVIDISPNIPSRDKFNTRKFAIEHDLGLPVAAVFFNAQRETAARRR

SEQ ID NO: 250 - protein, 178 aa, Brassica napus
MENMGTRVIEPLIVGRVVGDVLDNFAPTIKMNVSYNKKQVSNGHELFPLAVSSKPRVEIHDGDLRSFFTLVMTDPDVPNPSDPFLKERLHWLVMNIPGTTDATFGKEVVSYELPKPNIGIHRYVFVLFRQKQRRVKFPSNIISRDQFNTREFAIENDLGLPVAAVFFNAQRETASRRR

SEQ ID NO: 251 - protein, 178 aa, Brassica napus
MENMGTRVIEPLIVGRVVGDVLDNFTPTIKMNVSYNKKQVSNGHEFLPLAVSSKPRVEIHDGDLRSFFTLVMTDPDVPNPSDPFLKERLPWLVMNIPGTTDAAFGKEVVSYELPKPNIGIHRYVFVLFRQKQRRVKFPSNIISRDQFNTREFAIENDLGLPVAAVFFNAQRETASRRR

SEQ ID NO: 252 - protein, 175 aa, Brassica napus
MARISSDPLMVGRVIGDVVDNCLQAVKMTVTYNSDKQVYNGHELFPSVVTNKPKVEVHGGDMRSFFTLVMTDPDVPGPSDPYLREHLHWIVTDIPGTTDVTFGKEIVGYEMPRPNIGIHRFVYLLFKQNCRGSVISVPSYRDQFNTRMFAHENDLGLPVAAVFFNCQRETAARRR

SEQ ID NO: 253 - protein, 175 aa, Brassica napus
MARISSDPLMVGRVIGDVVDNCLHAVKMTVTYNSDKQVYNGHELLPSVVTNKPKVEVHGGDMRSFFTLVMTDPDVPGPSDPYLREHLHWIVTDIPGTTDVTFGKEIVGYEMPRPNIGIHRFVYLLFKQNCRGSVISVPSYRDQFNTRMFAHENDLGLPVAAVFFNCQRETAARRR

SEQ ID NO: 254 - protein, 175 aa, Brassica napus
MSRISSDPLMVGRVIGDVVDNCLQAVKMTVTYNCDKQVYNGHELFPSAVTNKPKVEVHGGDMRSFFTLVMTDPDVPGPSDPYLREHLHWIVTDIPGTTDVTFANEIVGYEMPRPNIGIHRFVYLLFKQNRRGSVVSVPSYRDQFNTRMFAYENDLGLPVAAVFFNCQRETAARRR

SEQ ID NO: 255 - protein, 175 aa, Brassica napus
MSRISSDPLMVGRVIGDVVDNCLQAVKMTVTDNCDKQVYNGHELFPSAVTNKPKVEVHGGDMRSFFTLVMTDPDVPGPSDPYLREHLHWIVTDIPGTTDVTFGKEIVGYEMPRPNIGIHRFVYLLFKQNRRGSVVSVPSYRDQFNTRMFAYENDLGLPVAAVFFNCQRETAARRR

SEQ ID NO: 256 - protein, 175 aa, Brassica napus
MARISADPLMVGRVIGDVVDSCLQAVKMTVTYNCDKQVYNGHELFPSAVTNKPKVEVHGGDMRSFFTLVMTDPDVPGPSDPYLREHLHWIVTDIPGTTDVTFGNEIVGYEMPRPNIGIHRFVYLLFKQNRRGSVVSVPSYRDQFNTRMFAHDNDLGLPVAAVFFNCQRETAARCR

SEQ ID NO: 257 - protein, 179 aa, Brassica oleracea
MENMGSRVIEPLIVGRVVGEVLDFFTQTIEMNVSYNKKQVCNGHELFPSSVSSKPRVEIHGGDLRSFFTLVMIDPDVPGPSDPYLKEHLHWIVTNIPGTTDATFGKEVVSYEFPRPNIGIHRFVFVLFKQKQRHVIDISQNIPSRDKFNTRKFAIEHDLGLPVAAVFFNAQRETAARRR

SEQ ID NO: 258 - protein, 177 aa, Brassica oleracea
ENMGTRVIEPLIVGRVVGDVLDNFTPTIKMNVSYNKKQVSNGHELFPLAVSSKPRVEIHDGDLRSFFTLVMTDPDVPNPSDPFLKGRLHWLVMNIPGTTDATFGKEVVSYELPKPNIGIHRYVFVLFRQKQRRVKFPSNIISRDQFNTREFAIENDLGLPVAAVFFNAQRETASRRR

SEQ ID NO: 259 - protein, 177 aa, Brassica oleracea
ENMGTRVIEPLIVGRVVGDVLDNFTPTIKMNVSYNKKQVSNGHELFPLAVSSKPRVETHDGDLRSFFTQVMTDPDVPNPSDPFLKERLHRLVMNIPGTTDATLGKEVVSYELPKPNIGIHRYVFVLFRQKQRRVKFPSNIISRDQFNTREFAIENDLGLPVAAVFFNAQRETASRRR

SEQ ID NO: 260 - protein, 174 aa, Brassica oleracea var. oleracea
MGERVIEPLIMGRVVGDVLDFFTPTIKMNVSYNMKQVSNSHELFPSSVSSKPRVEIHGGDLRSFFTLVMIDPDVPGPSDPFLKEHLHWIVTNIPGTTDATFGKEVVSYELPRPSIGIHRFVFVLFKQKQRRVIFPNIPSRDNFNTRKFAIEYDLGLPVAAVFFNAQRETAARRR

SEQ ID NO: 261 - protein, 179 aa, Brassica oleracea var. oleracea
MENMGSRVIEPLIVGRVVGEVLDFFTQTIEMNVSYNKKQVCNGHELFPSSVSSKPRVEIHGGDLRSFFTLVMTDPDVPGPSDPFLKEHLHWIVTNIPGTTNATFGKEVVSYEFPRPNIGIHRFVFVLFKQKQRHVIDISPNIPSRDKFNTRKFAIDHDLGLPVAAVFFNAQRETAARRR

SEQ ID NO: 262 - protein, 178 aa, Brassica oleracea var. oleracea
MENMGTRVIEPLIVGRVVGDVLDNFTPTIKMNVSYNKKQVSNGHELFPLAVSSKPRVEIHDGDLRSFFTLVMTDPDVPNPSDPFLKERLHWLVMNIPGTTDATFGKEVVSYELPKPNIGIHRYVFVLFRQKQRRVKFPSNIISRDQFNTREFAIENDLGLPVAAVFFNAQRETASRRR

SEQ ID NO: 263 - protein, 175 aa, Brassica oleracea var. oleracea
MSRISSDPLMVGRVIGDVVDNCLQAVKMTVTYNCDKQVYNGHELFPSAVTNKPKVEVHGGDMRSFFTLVMTDPDVPGPSDPYLREHLHWIVTDIPGTTDVTFGKEIVGYEMPRPNIGIHRFVYLLFKQNRRGSLVSVPSYRDQFNTRMFAYENDLGLPVAAVFFNCQRETAARRR

SEQ ID NO: 264 - protein, 175 aa, Brassica oleracea var. oleracea
MARISSDPLMVGRVIGDVVDNCLHAVKMTVTYNSDKQVYNGHELLPSVVTNKPKVEVHGGDMRSFFTLVMTDPDVPGPSDPYLREHLHWIVTDIPGTTDVTFGKEIVAYEMPRPNIGIHRFVYLLFKQNCRGSVISVPSYRDQFNTRMFAHANDLGLPVAAVFFNCQRETAARRR

SEQ ID NO: 265 - protein, 175 aa, Brassica oleracea var. oleracea
MARVSADPLMVGRVIGDVVDSCLQAVKMTVTYNCDKQVYNGHELFPSAVTNKPKVEVHGGDMRSFFTLVMTDPDVPGPSDPYLREHLHWIVTDIPGTTDVTFGNEIVGYEMPRPNIGIHRFVYLLFKQNRRGSVVSVPSYRDQFNTRMFAHDNDLGLPVAAVFFNCQRETAARCR

SEQ ID NO: 266 - protein, 161 aa, Brassica oleracea var. oleracea
MARVSADPLMVGRVIGDVVDSCLQAVKMTVTYNCDKQVYNGHELFPSAVTNKPKVMTDPDVPGPSDPYLREHLHWIVTDIPGTTDVTFGNEIVGYEMPRPNIGIHRFVYLLFKQNRRGSVVSVPSYRDQFNTRMFAHDNDLGLPVAAVFFNCQRETAARCR

SEQ ID NO: 267 - protein, 177 aa, Brassica rapa
MENMGVRVIEPLIMGRVVGDVLDFFTPTIKMNVSYNKNQVSNGHELLPSSVSSKPRVEIHGGDLRSFFTLVMIDPDVPGPSDPFLKEHLHWIVTNIPGTTDATFGKEVVSYELPRPSIGIHRFVFVLFKQKQRRVIFPNIPSRDNFNTRKFAIEYDLGLPVAAVFFNAQRETAARRR

SEQ ID NO: 268 - protein, 179 aa, Brassica rapa
MENMGSRVIEPLIVGRVVGEVLDFFTQTIEMNVSYNKKQVCNGHELFPSSVSSKPRVEIHGGDLRSFFTLVMIDPDVPGPSDPFLKEHLHWIVTNIPGTTDATFGKEVVSYEFPRPNIGIHRFVFVLFKQKQRHVIDISPNIPSRDKFNTRKFAIEHDLGLPVAAVFFNAQRETAARRR

SEQ ID NO: 269 - protein, 179 aa, Brassica rapa
MENMGSRVIEPLIVGRVVGEVLDFFTQTIEMNVSYNKKQVCNGHELFPSFVSSKPRVEIHGGDLRSFFTLVMIDPDVPGPSDPFLKEHLHWIVINIPGTTDATFGKEVVSYEFPRPNIGIHRFVFVLFKQKQRHVIDISPNIPSRDKFNTRKFAIEHDLGLPVAAVFFNAQRETAARRR

SEQ ID NO: 270 - protein, 178 aa, Brassica rapa
MENMGTRVIEPLIVGRVVGDVLDNFTPTIKMNVSYNKKQVSNGHEFLPLAVSSKPRVEIHDGDLRSFFTLVMTDPDVPNPSDPFLKERLHWLVMNIPGTTDATFGKEVVSYELPKPNIGIHRYVFVLFRQKQRRVKFPSNIISRDQFNTREFAIENDLGLPVAAVFFNAQRETASRRR

SEQ ID NO: 271 - protein, 178 aa, Brassica rapa
MENMGTRVIEPLIVGRVVGDVLDNFTPTIKMNVSYNKKQVSNGHEFLPLAVSSKPRVEIHDGDLRSFFTLVMTDPDVPNPSDPFLKERLHWLVMNIPGTTDATFGKEVVSYELPKPNIGIHRYVFVLFRQKQRRVKFPSNIISRDQFNTREFAIENDLGLPVAAVFFNAQRETASCRR

SEQ ID NO: 272 - protein, 153 aa, Brassica rapa
MENMGVRVIEPLIMGRVVGDVLDFFTPTIKMNVSYNKNQVSNGHELLPSSVSSKPRVEIHGGDLRSFFTLVMIDPDVPGPSDPFLKEHLHWPSIGIHRFVFALFKQKQRRVIFPNIPSRDNFNTRKFAIEYDLGLPVAAVFFNAQRETAARRR

SEQ ID NO: 273 - protein, 175 aa, Brassica rapa
MSRISSDPLMVGRVIGDVVDNCLQAVKMTVTYNCDKQVYNGHELFPSAVTNKPKVEVHGGDMRSFFTLVMTDPDVPGPSDPYLREHLHWIVTDIPGTTDVTFGKEIVGYEMPRPNIGIHRFVYLLFKQNRRGSVVSVPSYRDQFNTRMFAYENDLGLPVAAVFFNCQRETAARRR

SEQ ID NO: 274 - protein, 175 aa, Brassica rapa
MARISADPLMVGRVIGDVVDSCLQAVKMTVTYNCDKQVYNGHELFPSAVTNKPKVEVHGGDMRSFFTLVMTDPDVPGPSDPYLREHLHWIVTDIPGTTDVTFGNEIVGYEMPRPNIGIHRFVYLLFKQNRRGSVVSVPSYRDQFNTRMFAHDNDLGLPVAAVFFNCQRETAARRR

SEQ ID NO: 275 - protein, 201 aa, Brassica rapa
MARISSDPLMVGRVIGDVVDNCLQAVKMTVTYNSDKQVYNGHELFPSVVTNKPKVEVHGGDMRSFFTLKQALQIHVMSYILGVYLFMIIEYFKQVMTDPDVPGPSDPYLREHLHWIVTDIPGTTDVTFGKEIVGYEMPRPNIGIHRFVYLLFKQNCRGSVISVPSYRDQFNTRMFAHENDLGLPVAAVFFNCQRETAARRR

SEQ ID NO: 276 - protein, 177 aa, Camelina sativa
MENMGTRVIEPLIVGRVVGDVLDFFTPTTKMNVSYNKKQVSNGHELFPSSVSSKPRVEIYGGDLRSFFTLVMIDPDVPGPSDPFLKEHLHWLVTNIPGTTDATFGKEVVSYELPRPSIGIHRFVFVLFKQKQRRVIFPNIPSRDHFNTRKFAVEYDLGLPVAAVFFNAQRETAARKR

SEQ ID NO: 277 - protein, 177 aa, Camelina sativa
MENMGTRVIEPLILGRVLGDVLDFFTPTTKMNVSYNKKQVSNGHELFPSSVSSKPRVEIYGGDLRSFFTLVMIDPDVPGPSDPFLKEHLHWLVTNIPGTTDATFGKEVVSYELPRPSIGIHRFVFVLFKQKQRRVIFPNIPSRDHFNTRKFAVEYDLGLPVAAVFFNAQRETAARKR

SEQ ID NO: 278 - protein, 177 aa, Camelina sativa
MENMGTRVIEPLIVGRVVGDVLDFFTPTTKMNVSYNKKQVSNGHELFPSSVSSKPRVEIYGGDLRSFFTLVMIDPDVPGPSDPFLKEHLHWLVTNIPGTTDATFGKEVVSYELPRPSIGIHRFVFVLFKQKQRRVIFPSIPSRDHFNTRKFAVEYDLGLPVAAVFFNAQRETAARKR

SEQ ID NO: 279 - protein, 175 aa, Camelina sativa
MARISSDPLMVGRVIGDVVDNCLQAVKMTVTYNSDKQVYNGHELFPSAVTNKPKVEVHGGDMRSFFTLVMTDPDVPGPSDPYLREHLHWIVTDIPGTTDVSFGKEMIGYEMPRPNIGIHRFVYLLFKQNRRGSVVSVPSYRDQFNTREFAHENDLGLPVAAVFFNCQRETAARRR

SEQ ID NO: 280 - protein, 175 aa, Camelina sativa
MARISSDPLMVGRVIGDVVDNCLQAVKMTVTYNSDKQVYNGHELFPSAVTNKPKVEVHGGDLRSFFTLVMTDPDVPGPSDPYLREHLHWIVTDIPGTTDVSFGKEMIGYEMPRPNIGIHRFVYLLFKQNRRGSVVSVPSYRDQFNTREFAHENDLGLPVAAVFFNCQRETAARRR

SEQ ID NO: 281 - protein, 178 aa, Capsella rubella
MEINMGARVIEPLIVGRVVGDVLDFFTPTTKMNVSYNKKQVSNGHELFPSFVSSKPRVEIHGGDLRSFFTLVMIDPDVPGPSDPFLKEHLHWLVTNIPGTTDATFGKEVVSYELPRPSIGIHRFVFVLFKQKQRRVIFPNIPSRDHFNTRKFAVEYDLGLPVAAVFFNAQRETAARKR

SEQ ID NO: 282 - protein, 175 aa, Capsella rubella
MARISSDPLMVGRVIGDVVDNCLQAVKMTVTYNSDKQVYNGHELFPSVVTNKPKVEVHGGDMRSFFTLVMTDPDVPGPSDPYLREHLHWIVTDIPGTTDVSFGKERIGYEMPRPNIGIHRFVYLLFKQNRRGSVVSVPSYRDQFSTREFAHANDLGLPVAAVFFNCQRETAARRR

SEQ ID NO: 283 - protein, 177 aa, Cardamine flexuosa
MENMGTRVVEPLIVGRVVGDVLDYFIPTTKMHVSYNKKQVSNGHELFPSSVSSKPRVEIHGGDLRSFFTLVMIDPDVPGPSDPFLKEHLHWIVTNIPGTTDATFGKEVVSYELPRPSIGIHRYVFVLFKQKQRRVIFPNIPSRDHFNTRKFAVEYDLGLPVAAVFFNAQRETAARKR

SEQ ID NO: 284 - protein, 175 aa, Carica papaya
MARMMSDPLVVGRVIGEVVDPFTPNVKMAVTYNSNKQVFNGHELFPSAVTHKPKVEVHGGDMRSFFTLVMTDPDVPGPSDPYLREHLHWIVTDIPGTTDATFGKEVVSYEMPRPNIGIHRFVFLLFKQKRRNTVMSTPRSRDKFNTRKFAEDSELGLPVAAVFFNCQRETAARRR

SEQ ID NO: 285 - protein, 174 aa, Cicer arietinum
MARMSQEPLLVGRVIGEVLDSFTTSMKMTVSYNKKQVFNGHEFFPSTINIKPKVEIDGGDMRSFFTLVMTDPDVPGPSDPYLREHLHWIVTDIPGTTDATFGKELVSYEIPKPNIGIHRFVFVLFKQKSRESVMTTPSSRDHFNTRNFASQNDLGLPVAAVYFNAQRETAARRR

SEQ ID NO: 286 - protein, 173 aa, Citrus clementina
MAARMLEPLAVGRVIGDVIESFTPSIKMSVTYNNKQVCNGHELFPSTVVSKPRVEIQGGDMRSFFTLVMTDPDVPGPSDPYLREHLHWIVTDIPGTTDATFGRELVSYEIPRPNIGIHRFVFVLFKQTRRQTVNPPSSRDHFNTRAFAAENDLGLPVAAVYFNAQRETAARRR

SEQ ID NO: 287 - protein, 175 aa, Citrus clementina
MAKMSDALVLGRVVGEVIDYFTPSVKMTITYSSIKQQVYNGHEMFPSQVTQKPKVEVLGGDMRSFFTLIMTDPDVPGPSDPYLREHLHWIVTDIPGTTDASFGKEVVNYEIPRPNIGIHRFVFLLFKQKRRQTEMSVPASRDRFNTRKFAEENDLGLPVAAVFFNAQRETAARRR

SEQ ID NO: 288 - protein, 173 aa, Citrus sinensis
MAARMLEPLAVGGVIGDVIESFTPSIKMSVTYNNKQVCNGHELFPSTVVSKPRVEIQGGDMRSFFTLVMTDPDVPGPSDPYLREHLHWIVTDIPGTTDATFGRELVSYEIPRPNIGIHRFVFVLFKQTRRQTVNPPSSRDHFNTRAFAAENDLGLPVAAVYFNAQRETAARRR

SEQ ID NO: 289 - protein, 173 aa, Citrus sinensis
MAARMLEPLAVGGVIGDVIESFTPSIKMSVTYDNKQVCNGHELFPSTVVSKPRVEIQGGDMRSFFTLVMTDPDVPGPSDPYLREHLHWIVTDIPGTTDATFGRELVSYEIPRPNIGIHRFVFVLFKQTRRQTVNPPSSRDHFNTRAFAAENDLGLPVAAVYFNAQRETAARRR

SEQ ID NO: 290 - protein, 175 aa, Citrus sinensis
MAKMSDALVLGRVVGEVIDYFTPSVKMTVTYNSIKQQVYNGHEMFPSQVTQKPKVEVLGGDMRSFFTLIMTDPDVPGPSDPYLREHLHWIVTDIPGTTDASFGKEVVNYEIPRPNIGIHRFVFLLFKQKRRQTEMSVPASRDRFNTRKFAEENDLGLPVAAVFFNAQRETAARRR

SEQ ID NO: 291 - protein, 173 aa, Citrus trifoliata
MAARMLEPLAVGRVIGDVIESFTPSIKKSVTYNNKQVCNGHELFPSTVVSKPRVEIQGGDMRSFFTLVMTDPDVPGPSDPYLREHLHWIVTDIPGTTDATFGRELVSYEIPRPNIGIHRFVFVLFKQTRRQTVNPPSSRDHFNTRAFAAENDLGLPVAAVYFNAQRETAARRR

SEQ ID NO: 292 - protein, 175 aa, Cornus canadensis
MARVSDLPLVVGRVIGDVVDYFSPSVKMTITYNSQKQIYNGHELFPSSVTSKPRAQVHGGDMRSFFTLIMTDPDVPGPSDPYLREHIHWMVTDIPGTTDSSFGREVISYEMPRPIIGIHRFVFLLFKQKYRLNVISVPDSRDGFITRKFAEDNDLGLPVAAVFFNCQRETAARKR

SEQ ID NO: 293 - protein, 175 aa, Cornus controversa
MARVSDLPLVVGRVIGDVVDYFSPSVKMTITYNSQKQIYNGHELFPSSVTSKPRAQVHGGDMRSFFTLIMTDPDVPGPSDPYLREHIHWMVTDIPGTTDSTFGREVMSYEMPRPNIGIHRFVFLLFKQKYRQTVITTPASRDGFNTRKFAEENELGLPVAAVFFNCQRETAARKR

SEQ ID NO: 294 - protein, 175 aa, Cornus florida
MARVSDLPLVVGRVIGDVVDYFSPSVKMTITYNSNKQIYNGHELFPSSVTAKPRAQVHGGDMRSFFTLIMTDPDVPGPSDPYLREHIHWMVTDIPGTTDSSFGREVLSYEMPRPNIGIHRFVFLLFKQKYRQTVISIPASRDGFSTRKFAEENELGLPVAAVFFNCQRETAARKR

SEQ ID NO: 295 - protein, 175 aa, Cornus macrophylla
MARVSDLPLVVGRVIGDVVDYFSPSVKMTITYNSNKQICNGHELFPSSVTSKPRAQVHGGDMRSFFTLIMTDPDVPGPSDPYLREHIHWMVTDIPGTTDSTFGREVMSYEMPRPNIGIHRFVFLLFKQKYRQTVITTPASRDGFNTRKFAEENELGLPVAAVFFNCQRETAARKR

SEQ ID NO: 296 - protein, 175 aa, Cornus officinalis
MARVSDLPLVVGRVIGDVADYFSPSVKMTITYNSNKQIYNGHELFPSSVTSKPRAQVHGGDMRSFFTLIMTDPDVPGPSDPYLREHIHWMVTDIPGTTDSSFGREVMSYEMPRPNIGIHRFVFLLFKQKYRQTVITTPASRDGFNTRKFAEENELGLPVAAVFFNCQRETAARKR

SEQ ID NO: 297 - protein, 174 aa, Cynara cardunculus var. scolymus
MARITSDPLVIGRVVGDVVDNFTPTVEMSVTYNLSKQVYNGHELFPSSVTAKPKVDVRGGDMRSFFTLIMTDPDVPGPSDPYLREHLHWIVTDIPGTTDSSFGKEVVSYETPRPNIGIHRFVFLLYKQRGRQTVTCPSSRRSFNTRNFAQENQLGSPVAAVFFNCQRETAARRR

SEQ ID NO: 298 - protein, 175 aa, Dorcoceras hygrometricum
MAKMSSDPLVIGRVIGDVVDDFYPCVKMSVTYNSNKHVYNDYEHLPSSVSSKPRVEVHGGDMRSFFTLIMTDPDVPGPSDPYLREHLHWIITDIPGTTDSSFGKEAVSYEMPRPNIGIHRFIFLLFKQKKRQSLMKPPICRDGFNTRKFAEENELGLPVAAVFFNCQRETAARKR

SEQ ID NO: 299 - protein, 174 aa, Durio zibethinus
MAKLSDPLVVGRVIGDVIDAISPSVKMTVTFNFNKQVYNGHELFPSSVTNKPKVEVHGGDMRSFFTLVMTDPDVPGPSDPYLKEHLHWIVTDIPGTTDATFGKEVVNYEMPRPNIGIHRFVFLLFKQKRRQTVISTPSSRDHFNTRKFAEENELGLPVAAVYFNAQRETAARRR

SEQ ID NO: 300 - protein, 174 aa, Durio zibethinus
MAKLSDPLVVGRVIGDVIDAISPSVKMTVTFNFNKQVYNGHELFPSSVTNKPKVEVHGGDMRSFFTLVMTDPDVPGPSDPYLKEHLHWIVTDIPGTTDATFGREVVNYEMPRPNIGIHRFVFLLFKQKRRQTVISTPSSRDHFNTRKFAEENELGLPVAAVYFNAQRETAARRR

SEQ ID NO: 301 - protein, 172 aa, Eriobotrya japonica
MTRALEPLVVGRVIGDVLDSFTATTKMSVTYNTKLVCNGLELFPSVVTAKPRVEIQGGDMRSFFTLVMTDPDFPGPSDPYLREHLHWIVTDIPGTTDATFGREVVSYEMPRPNIGIHRFVFVLFKQNRRQSINTPSSRDHFSTRSFAAENDLGLPVAAVYFNAQRETAARRR

SEQ ID NO: 302 - protein, 174 aa, Eucalyptus grandis
MAKVSSNPLVVGRIIGDVTDSFSASVKMTVTYNSNKQVFNGHELFPSWVTAKPKVEVHGGDMRSFFTLVMTDPDVPGPSDPYLREHLHWIVTDIPGTTDATFGKEVVGYEMPRPNIGIHRFVFLLFKQKRREMVRPPSSRDRFNTRKFADDNELGLPVAAVFFNAQRETAARRR

SEQ ID NO: 303 - protein, 173 aa, Eucalyptus grandis
MARMSDPLVVGRVIGDVIDCFATSVKTTVTYNSNKHVFNGHELFPSTVTAKPRVEVHGGDMRSFFTLVMTDPDVPGPSDPYLREHLHWMVTDIPGTTDATFGKEVVEYEMPRPNIGIHRFVFILFKQKRRDMVRGPSSRDRFNTRRFAEDNELGLPVAAVYFNAQRETAARRR

SEQ ID NO: 304 - protein, 177 aa, Eutrema salsugineum
MENMGSRVIEPLIVGRVVGDVLDFFTPTIKMSVSYNKKQVSNGHELFPSTVSSKPRVEIHGGDLRSFFTLVMIDPDVPGPSDPFQKEHLHWIVTNIPGTTDATFGKEVVSYELPRPSIGIHRFVFVLFKQKQRRVIFPNILSRDHFNTRKFAIEYDLGLPVAAVFFNAQRETAARRR

SEQ ID NO: 305 - protein, 177 aa, Eutrema salsugineum
  misc_feature (53)..(53): Xaa can be any naturally occurring amino acid
MENMGSRVIEPLIVGRVVGDVLDFFTPTIKMSVSYNKKQVSNGHELFPSTVSXTPRVEIHGGDLRSFFTLVMIDPDVPGPSDPFQKEHLHWIVTNIPGTTDATFGKEVVSYELPRPSIGIHRFVFVLFKQKQRRVIFPNILSRDHFNTRKFAIEYDLGLPVAAVFFNAQRETAARRR

SEQ ID NO: 306 - protein, 157 aa, Eutrema salsugineum
MENMGSRVIEPLIVGRVVGDVLDFFTPTIKMSVSYNKKQVSNGHELFPSTVMIDPDVPGPSDPFQKEHLHWIVTNIPGTTDATFGKEVVSYELPRPSIGIHRFVFVLFKQKQRRVIFPNILSRDHFNTRKFAIEYDLGLPVAAVFFNAQRETAARRR

SEQ ID NO: 307 - protein, 175 aa, Eutrema salsugineum
MARISSDPLIVGRVIGDVVDNCLQAVKMTVTYNSDKQVYNGHEIFPSTVTNKPKVDVHGGDMRSFFTLVMTDPDVPGPSDPYLREHLHWIVTDIPGTTDVTFGKEIVGYEMPRPNIGIHRFVYLLFKQNRRGSVVAVPSYRDQFNTRMFAHENDLGLPVAAVFFNCQRETAARRR

SEQ ID NO: 308 - protein, 172 aa, Ficus carica
MARMSEPLVVGRVIGDVLESFTPTTKMCVSYNRKQVCNGHELFPSAVTTKPKVEIQGGDMRSFFTLIMTDPDVPGPSDPYLREHLHWIVTDIPGTTDATFGREVVSYEMPKPNIGIHRFVFVLFKQKSRQSVTPPSSRDHFNTRNFAAENDLGLPVAAVTFNAQRETAARRR

SEQ ID NO: 309 - protein, 172 aa, Fragaria iinumae
MARMSEPLAVGRVIGDVLDSFTPTTKMIVTYNTKLVCNGHELFPSAVTAKPRVEIQGGDMRSFFTLVMTDPDVPGPSDPYLKEHLHWIVTDIPGTTDATFGREVVSYEMPRPNIGIHRFVFVLFMQKRRQSVNPPSSRDHFNTRTFAAENDLGIPVAAVYFNAQRETAARRR

SEQ ID NO: 310 - protein, 172 aa, Fragaria vesca
MARMSEPLAVGRVIGDVLDSFTPTTKMIVSYNSKLVCNGHELFPSAVTAKPRVEIQGGDMRSFFTLVMTDPDVPGPSDPYLKEHLHWIVTDIPGTTDATFGREVVSYEMPRPNIGIHRFVFVLFMQKRRQSVNPPSSRDHFNTRTFAAENDLGVPVAAVYFNAQRETAARRR

SEQ ID NO: 311 - protein, 172 aa, Fragaria vesca
MARMSEPLAVGRVIGDVLDSFTPTTKMIVSYNSKLVCNGHELFPSAVTAKPRVEIQGGDMRSFFTLVMTDPDVPGPSDPYLKEHLHWIVTDIPGTTDATFGREVVSYEMPRPNIGIHRFVFVLFMQKRRQSMNPPSSRDHFNTRTFAAENDLGVPVAAVYFNAQRETAARRR

SEQ ID NO: 312 - protein, 172 aa, Fragaria x ananassa
MARMSEPLAVGRVIGDVLDSFTPTTKMIVTYNTKLVCNGHELFPSAVTAKPRVEIQGGDMRSFFTLVMTDPDVPGPSDPYLKEHLHWIVTDIPGTTDATFGREVVSYEMPRPNIGIHRFVFVLFMQKRRQSVNPPSSRDHFNTRTFAAENDLGVPVAAVYFNAQRETAARRR

SEQ ID NO: 313 - protein, 172 aa, Fragaria x ananassa
MARMSEPLAVGRVIGDVLDSFTPTTKMIVTYNTKLVCNGHELFPSAVTAKPKVEIQGGDMRSFFTLVMTDPDVPGPSDPYLKEHLHWIVTDIPGTTDATFGREVVSYEMPRPNIGIHRFVFVLFMQKRRQSVNPPSSRDHFNTRTFAAENDLGIPVAAVYFNAQRETAARRR

SEQ ID NO: 314 - protein, 173 aa, Glycine max
MAKMPLEPLIVGRVIGEVLDSFTTSTKMTVSYNKKQVYNGHELFPSTVNTKPKVEIEGGDMRSFFTLIMTDPDVPGPSDPYLREHLHWIVTDIPGTTDATFGKELVSYEVPKPNIGIHRFVFVLFKQKRRQCVTPPTSRDHFNTRKFAAENDLGLPVAAVYFNAQRETAARRR

SEQ ID NO: 315 - protein, 170 aa, Glycine max
MPLEPLIVGRVIGEVLDSFTTSTKMTVSYNKKQVYNGHELFPSTVNTKPKVEIEGGDMRSFFTLIMTDPDVPGPSDPYLREHLHWIVTDIPGTTDATFGKELVSYEVPKPNIGIHRFVFVLFKQKRRQCVTPPTSRDHFNTRKFAAENDLGLPVAAVYFNAQRETAARRR

SEQ ID NO: 316 - protein, 173 aa, Glycine max
MAKMPLEPLIVGRVIGEVLDSFTTSTKMTVSYNKKQVYNGHELFPSTVNTKPKVEIEGGDMRSFFTLIMTDPDVPGPSDPYLREHLHWIVTDIPGTTDATFGKELVSYEVPKPNIGIHRFVFVLFKQKRKQCVTPPTSRDHFNTRKFAAENDLGLPVAAVYFNAQRETAARRR

SEQ ID NO: 317 - protein, 173 aa, Glycine max
MAKMPLEPLIVGRVIGEVLDSFTTSTKMTVSYNKKQVYNGHELFPSTVNTKPKVEIEGGDMSSFFTLIMTDPDVPGPSDPYLREHLHWIVTDIPGTTDATFGKELVSYEVPKPNIGIHRFVFVLFKQKRRQCVTPPTSRDHFNTRKFAAENDLGLPVAAVYFNAQRETAARRR

SEQ ID NO: 318 - protein, 173 aa, Glycine max
MAKMPLEPLIVGRVIGEVLDSFTTSTKMTVSYNKKQVYNGHELFPSTVNTKPKVEIEGGDMRSFFTLIMTDPDVPGPSDPYLREHLHWIVTDIPGTTDATFGKELVSYEVPKPNIGIHRFVFVLFKQKRRQCVTPPTSRDHFNTRKFAAENDLGLPVAAVYFNAQWETAARRR

SEQ ID NO: 319 - protein, 173 aa, Glycine max
MAKMPLEPLIVGRVIGEVLDSFTTSTKMTVSYNKKQVYNGHELFPSTVNTKPKVEIEGGDMRSFFTLIMTDPDVPGPSDPYLREHLHWIVTDIPGTTDATFGKELVSYEVPKLNIGIHRFVFVLFKQKRRQCVTPPTSRDHFNTRKFAAENDLGLPVAAVYFNAQRETAARRR

SEQ ID NO: 320 - protein, 173 aa, Glycine max
MARMPLEPLIVGRVIGEVLDSFTTSTKMIVSYNKNQVYNGHELFPSTVNTKPKVEIEGGDMRSFFTLIMTDPDVPGPSDPYLREHLHWIVTDIPGTTDATFGKELVSYEIPKPNIGIHRFVFVLFKQKRRQCVTPPTSRDHFNTRKFAAENDLALPVAAVYFNAQRETAARRR

SEQ ID NO: 321 - protein, 243 aa, Glycine max
MENHAPTNRNVAHCVHAIKEGSLRKAYNKNFCTSMSSHSLSSAGFIITIVFLPSLAPLPLLSSSLFLPLTMARMPLEPLIVGRVIGEVLDSFTTSTKMIVSYNKNQVYNGHELFPSTVNTKPKVEIEGGDMRSFFTLIMTDPDVPGPSDPYLREHLHWIVTDIPGTTDATFGKELVSYEIPKPNIGIHRFVFVLFKQKRRQCVTPPTSRDHFNTRKFAAENDLALPVAAVYFNAQRETAARRR

SEQ ID NO: 322 - protein, 175 aa, Glycine max
MNMISSDPLVIGKVIGDVVDHFTPTVKITVSYNNNKQVYNGHEFFPSSVTTKPKVQIHGGDMRSFFTLVMTDPDVPGPSDPYLREHLHWLVTDIPGTTDATFGNEVVEYEIPRPNIGIHRFVFLVFKQKRRQGVLKTPTTRDLFNSRSFAEENELGPPVAAVFFNAQRETAARRR

SEQ ID NO: 323 - protein, 173 aa, Glycine soja
MARMPLEPLIVGRVIGEVLDSFTTSTKMIVSYNKNQVYNGHELFPSTVNTKPKVEIEGGDMRSFFTLIMTDPDVPGPSDPYLREHLHWIVTDIPGTTDATFGKELVSYEIPKPNIGIHRFVFVLFKQKRRQCVTPPTSRDHFNTRKFAAENDLGLPVAAVYFNAQRETAARRR

SEQ ID NO: 324 - protein, 174 aa, Gossypium arboreum
MAKLSDPLVVGRVIGDVIDALSPSVKMSVTFNTNKQVYNGHEFFPSAVTNKPKVEVHGGDMRSFFTLVMTDPDVPGPSDPYLREHLHWIVTDIPGTTDATFGKEMVNYEMPRPNIGIHRFVFLLFKQKGRQTVRSIPSSRDRFDTRKFAEENELGVPVAAVYFNAQRETAARRR

SEQ ID NO: 325 - protein, 174 aa, Gossypium arboreum
MAKLSDPLVVGRVIGDVIDALSPSVKMSVTFNTNKQVYNGHEFFPSAVTNKPKVEVHGGDMRSFFTLVMTDPDVPGPSDPYLREHLHWIVTDIPGTTDATFGREMVNYEMPRPNIGIHRFVFLLFKQKGRQTVRSIPSSRDRFDTRKFAEENELGVPVAAVYFNAQRETASRRR

SEQ ID NO: 326 - protein, 174 aa, Gossypium barbadense
MAKLSDPLVLGRVIGDVIDALSPSVKMSVTFNTNKQVYNGHEFFPSAVTNKPKVEVNGGDMRSFFTLVMTDPDVPGPSDPYLREHLHWIVTDIPGTTDATFGREMVNYEMPRPNIGIHRFVFLLFKQKGRQTVRSIPSSRDRFDTRKFAEENELGVPVAAVYFNAQRETAARRR

SEQ ID NO: 327 - protein, 174 aa, Gossypium barbadense
MAKLSDPLVLGRVIGDVIDALSPSVKMSVTFNTNKQVYNGHEFFPSAVTNKPKVEVNGGDMRSFFTLVMTDPDVPGPSDPYLREHLHWIVTDIPGTTDATFGREMVNYEMPRSNIGIHRFVFLLFKQKGRQTVRSIPSSRDRFDTRKFAEENELGVPVAAVYFNAQRETAARRR

SEQ ID NO: 328 - protein, 174 aa, Gossypium hirsutum
MAKLSDPLVVGRVIGDVIDALSPSVKMSVTFNTNKQVYNGHEFFPSAVTNKPKVEVHGGDMRSFFTLVMTDPDVPGPSDPYLREHLHWIVTDIPGTTDATFGREMVNYEMPRPNIGIHRFVFLLFKQKGRQTVRSIPSSRDRFDTRKFAEENELGVPVAAVYFNAQRETAARRR

SEQ ID NO: 329 - protein, 174 aa, Gossypium hirsutum
MAKLSDPLVLGRVIGDVIDALSPSVKMSVTFNTNKQVYNGHEFFPSAVTNKPKVEVHGGDMRSFFTLVMTDPDVPGPSDPYLREHLHWIVTDIPGTTDATFGREMVNYEMPRPNIGIHRFVFLLFKQKGRQTVRSIPSSRDRFDTRKFAEENELGVPVAAVYFNAQRETAARRR

SEQ ID NO: 330 - protein, 174 aa, Gossypium hirsutum
MAKLSDPLVLGRVIGDVIDALSPSVKMSVTFNTNKQVYNGHEFFPSAVTNKPKVEVHGGDMRSFFTLVMTDPNVPGPSDPYLREHLHWIVTDIPGTTDATFGREMVNYEMPRPNIGIHRFVFLLFKQKGRQTVRSIPSSRDRFDTRKFAEENELGVPVAAVYFNAQRETAARRR

SEQ ID NO: 331 - protein, 174 aa, Gossypium raimondii
MAKLSDPLVLGRVIGDVIDALSPSVKMSVTFNTNKQVYNGHEFFPSAVTNKPKVEVHGGDMRSFFTLVMTDPDVPGPSDPYLREHLHWIVTDIPGTTDATFGREMVNYEMPRPNIGIHRFVFLLFKQKGRQTVRSIPSSRDRFYTRKFAEENELGVPVAAVYFNAQRETAARRR

SEQ ID NO: 332 - protein, 174 aa, Herrania umbratica
MAKLSDPLVVGRVIGDVIDAITPSVKMTVTFNSNKQVYNGHELFPSSVTNKPKVDVHGGDMRSFFTLVMTDPDVPGPSDPYLREHLHWIVTDIPGTTDATFGREVVNYEMPRPNIGIHRFVFLLFKQKRRQAVLSTPSSRDHFNTRKFAEENELGLPVAAVYFNAQRETAARRR

SEQ ID NO: 333 - protein, 172 aa, Hevea brasiliensis
MARIIEPLIVGRVIGDVLDSFTPAIKMSVSYNNKQICNGYEHYPSAVAAKPRVEVQGGDMRSFFTLVMTDPDVPGPSDPYLREHLHWLVSDIPGTTDATFGREVVSYEIPRPSIGIHRFVFVLFKQKRRQTINPPTSRDNFSTRNFAAENDLGLPVAAVYFNAQRETAARRR

SEQ ID NO: 334 - protein, 172 aa, Hevea brasiliensis
MARIIEPLIVGRVIGDVLDSFTPAIKMSVSYNNKQICNGYEHYPSAVAAKPRVEVQGGDMRSFFTLVMTDPDVPGPSDPYLREHLHWLVSDIPGTTDATFGREVVSYEIPRPNIGIHRFVFVLFKQKRRQTINPPTSRDNFSTRNFAAENDLGLPVAAVYFNAQRETAARRR

SEQ ID NO: 335 - protein, 172 aa, Hevea brasiliensis
MARIIEPLIVGRVIGEVIDSFTPAIKMSVTYNNRQVYNGHEFYPSTVAAKPRVEVQGGDLRSFFTLVMTDPDVPGPSDPYLREHLHWVVSDIPGTTDATFGREIVSYEIPRPNIGIHRFVFVLFKQKRRQTINPPTSRDNFSTRNFAAENDLGLPVAAVYFNAQRETAARRR

SEQ ID NO: 336 - protein, 173 aa, Hevea brasiliensis
MAKTSDPLVVGGVIGDVIDYFSPTVKMTVTYNCNKQVYNGHELFPSAVTQKPKVEVQGGDMRSFFTLVMTDPDAPGPSDPYLREHLHWIVTDIPGTTDATFGREMVSYEMPRPNIGIHRFVFLLFKQERRQTVSTPSSRDKFNTRKFAEENGLGLPVAAVFFNAQRETAARRR

SEQ ID NO: 337 - protein, 173 aa, Hevea brasiliensis
MAKTSDPLVVGGVIGDVIDYFSTTVKMTVTYTCNKQVYNGHELFPSAVTQKPKVEVQGGDMRSFFTLVMTDPDAPGPSDPYLREHLHWIVTDIPGTTDATFGREMVSYEMPRPNIGIHRFVFLLFKQERRQTVSTPSSRDKFNTRKFAEENGLGLPVAAVFFNAQRETAARRR

SEQ ID NO: 338 - protein, 173 aa, Hevea brasiliensis
MAKTTDPLVVGRVIGDVIDYFTPIVKMTVTYNPNKQVYNGHELFPSAVTQKPKVEVQGGDMRSFFTLVMTDPDVPGPSDPYLREHLHWIVTDIPGTTDATFGREVVSYEMPRPNIGIHRFVFLLFKQRKRDTVTTPSSGDHFNTRKFAEENGLGLPVAAVFFNAQRETAARRR

SEQ ID NO: 339 - protein, 175 aa, Ipomoea nil
MAKMSDPLVIGRVVGDVVDHFSQSVKMSVVYNSNKHVYNGHEFFPSLLTSKPKVEVHDGDLRSFFTLIMTDPDVPGPSDPYLREHLHWIVTDIPGTTDSSFGREIVSYETPKPNIGIHRFVFLLYKQKRRQSVTVSSSPSRDRFNTRKFADDNDLGSPVAAVFFNCQRETAARRR

SEQ ID NO: 340 - protein, 173 aa, Jatropha curcas
MAKVSDPLVVGRVIGDVIDYFTPCMKMTVSYNSNKQVYNGHELFPSAVTHKPKVEVQGADMRSFFTLVMTDPDVPGPSDPYQREHLHWIVTDIPGTTDATFGKEVVSYEMPRPNIGIHRFVFILFKQKRRQMVNTPTSRDKFNTRKFAEENELGLPVAAVFFNAQRETAARRR

SEQ ID NO: 341 - protein, 172 aa, Juglans regia
MARMSEPLIVGRVIGDVLDSFTPSIKMTITYNTKQVCNGHELYPSTVTTKPRVEIQGGDMRSFFTLVMTDPDVPGPSDPYLREHLHWVVTDIPGTTDATFGREVVSYEIPRPNIGIHRYVFVLFKQKRRQSVNPPSSSDHFSTRSFAAENDLDLPVAAVYFNAQRETAARRR

SEQ ID NO: 342 - protein, 177 aa, Juglans regia
MANMSDPLLIGRVIGDVVESFSPTVRMTVTYNSNKQVYNGHELFPSAVSMKPKVEVHGGDMRSFFTLIMTDPDVPGPSDPYLREHLHWLVTDIPGTTDATFGREVVNYEMPRPNIGIHRFVFLLYKQKRRQTVLMNPNIPPARDRFNTRQFAEENELDLPVAAVFFNAQRETAARRR

SEQ ID NO: 343 - protein, 173 aa, Lactuca sativa
MARMSDPLVIGRVVGDVVDNFSPCVEMSVTYNSSKQVYNGHELFPSSVTAKPKVDVRGSDMRSFFTLIMTDPDVPGPSDPYLREHLHWIVTDIPGTTDSSFGKELVSYEVPRPNIGIHRFVFLLFKQRGRQTVVGPPSRHNFNTRSFAHENQLGLPVAGVFFNCQRETAARRR

SEQ ID NO: 344 - protein, 177 aa, Leavenworthia crassa
MENMRSRVADPLIVGRVIGDVLDFFTPTIKMHVTYNKKQVSNGHELFPSSVSSKPRVEIHGGDLRSFFTLVMVDPDVPGPSDPFLKEHLHWIVTNIPGTTDVTFGKEVVSYDLPRPSIGIHRFVFVLFRQKQRCVILPNITSRDHFNTRKFATEYDLGLPVAAVFFNAQRETAARKR

SEQ ID NO: 345 - protein, 173 aa, Lupinus angustifolius
MARMSLEPLIVGRVIGDVLDSFTSTMKMTVSYNNKQVFNGHELFPSTITNKPRVEIDGGDLRSFFTLVMTDPDVPGPSDPYLREHLHWMVTDIPGTTDATFGKDLVSYEIPKPNIGIHRFVFVLFKQKRRQCVTQPSSRDHFNTKNFAAENDLGLPVAAVYFNAQRETAARRR

SEQ ID NO: 346 - protein, 174 aa, Malus domestica
MAMMSSDPLVVGRVIGDVVDYFSPSVRMTVTYNSNKKVYNGHELFPSSVTIKPKVEVHGGDLRSFFTLVMTDPDVPGPSDPYLKEHLHWIVTDIPGTTDNTFGKEVVKYEMPRPNIGIHRFVFLLFKQKARQTVIPPASKDHFNTRKFAEANDLGLPVTAVFFNAQRETAARRR

SEQ ID NO: 347 - protein, 174 aa, Malus domestica
MAMLSSDPLVVGRVIGDVVDYFSPSVKMTVSYNSNKKVYNGHELFPSSVTIKPKVEVHGGDLRSFFTLVMTDPDVPGPSDPYLKEHLHWIVTDIPGTTDNTFGMEVVKYEMPRPNIGIHRFVFLLFKQKGRQTVIPPASKDHFNTRKFAEANDLGLPVTAVFFNAQRETAARRR

SEQ ID NO: 348 - protein, 175 aa, Mangifera indica
MARMPSDPLVVGRVIGDVVDCCDQTVKMAVTYNSSKQVYNGHELFPSSVTVKPKVEVHGGDMRSFFTLIMTDPDVPGPSDPYLREHLHWVVTDIPGTTDATFGKELVNYEMPRPNIGIHRFVFLLFRQKRRQTVISIPSSRDGFNTRKFAEDNDLGQPVAAVFFNAQRETAARRR

SEQ ID NO: 349 - protein, 172 aa, Manihot esculenta
MARIIEPLIVGGVIGDVLDPFLPAIKMSVSYNSRQVHNGHELFPSTLVSKPKVEIQGADLRSFFTLVMIDPDVPGPSDPYLREHLHWIVSNIPGTTDSTFGKEVASYEIPKPNIGIHRFVFVLFKQKRRQIISPPSSRDNFNTRRFATENDLGLPVAAVFFNAQRETAARRR

SEQ ID NO: 350 - protein, 172 aa, Manihot esculenta
MARIIEPLIVGRVIGDVLDSFTPSIKMSVSYSNRNVYNGHEFYPSAVASKPKIEVQGGDMRTFFTLVMTDPDVPGPSDPYLREHLHWIVSDIPGTTDATFGREVVSYEIPRPNIGIHRFVFVLFKQKRRHTINPPSSRDHFSTRNFAAENDLGLPVAAVYFNAQRETAARRR

SEQ ID NO: 351 - protein, 174 aa, Manihot esculenta
MAKTSTDPLVVGRVIGDVIDYFTPVVKMTVSYNSNKQVYNGHELFPSAVTHKPKVEVQGGDMRSFFTLVMTDPDVPGPSDPYLREHLHWLVTDIPGTTDATFGRELVSYEMPRPNIGIHRFVFLLFKQQRRQTVATPSSRDKFNTRKFAEENGLGLPVAAVFFNAQRETAARRR

SEQ ID NO: 352 - protein, 174 aa, Manihot esculenta
MAKTSDPLVVGRVIGDVIDYFSPSVKMTVSYCSNKQVYNGHELFPSAVKLKPKVEVQGGDMRSFFTLIMTDPDVPGPSDPYLREHLHWVVTDIPGTTDATFGREVVSYEMPRPNIGIHRFVFLLFKQQRRQAIVSTPSSREKFNTRKFAEENGLGLPVAAVFFNAQRETAARRR

SEQ ID NO: 353 - protein, 181 aa, Misopates orontium
MAAKVSSDPLVIGRVIGDVVDHFTSSVKMSVIYNANNSVKHVYNGHELFPSAVTSTPRVEVHGGDMRSFFTLIMTDPDVPGPSDPYLREHLHWIVTDIPGTTDSSFGKEVVSYEMPRPNIGIHRFVFLLFKQKKRGQAIMSPPLVTRDGFNTRKFTQENELGLPVAAVFFNCQRETAARRR

SEQ ID NO: 354 - protein, 172 aa, Morus notabilis
MERMSEPLVIGRVIGDVLDSFTPTTKMSVSYNKKQVCNGHELFPSAVTTKPRVEIQGGDMRCFFTLIMTDPDVPGPSDPYLREHLHWIVTDIPGTTDATFGKEVVSYEMPKPNIGIHRFVFVLFKQKSRQSVNPPSSRDHFNTRNFAAENDLGLPVAAVYFNAQRETAARRR

SEQ ID NO: 355 - protein, 172 aa, Morus notabilis
MERMSEPLVIGRVIGDVLDSFTPTTKMSVSYNKKQVCNGHELFPSAVTTKPRVEIQGGDMRCFFTLIMTDPDVPGPSDPYLREHLHWIVTDIPGTTDATFGREVVSYEMPKPNIGIHRFVFVLFKQKSRQSVNPPSSRDHFNTRNFAAENDLGLPVAAVYFNAQRETAARRR

SEQ ID NO: 356 - protein, 169 aa, Morus notabilis
MSEPLVIGRVIGDVLDSFTPTTKMSVSYNKKQVCNGHELFPSAVTTKPRVEIQGGDMRCFFTLIMTDPDVPGPSDPYLREHLHWIVTDIPGTTDATFGREVVSYEMPKPNIGIHRFVFVLFKQKSRQSVNPPSSRDHFNTRNFAAENDLGLPVAAVYFNAQRETAARRR

SEQ ID NO: 357 - protein, 175 aa, Musa acuminata subsp. malaccensis
MARLSSDPLTVGRVIGEVIDSFNPSVKMMVTYNSNKLVYNGHELFPSAVVSKPRVEVQGGEMRSFFTLVMTDPDAPGPSDPYLREHVHWVVTDIPGTTDASFGKEVVSYESPRPSIGIHRFVFVLFKQKRRQSVAAAPPSRDRFSTRGFAQENDLDLPVAAVYFNAQRETAARRR

SEQ ID NO: 358 - protein, 173 aa, Nicotiana attenuata
MARNVEPLVVGRVVGDVLDSFSPTDKMTVTYNNKQVCNGQELFPSAVTIRPRVEVQGGDMRTFFTLVMTDPDVPGPSDPYLREHLHWIVTDIPGTTDATFGKELVSYEIPRPNIGIHRFVFVLFKQKCRQSVSPHAVSRDHFNTRNFANVNDLGPPVAAVFFNAQRETAARRR

SEQ ID NO: 359 - protein, 175 aa, Nicotiana attenuata
MGSKMSDPLVIGRVIGEVVDYFTPSVKMSVTYNSSKHVYNGHELFPSSVTSKPRVEVQGGDLRSFFTLIMIDPDVPGPSDPYLREHLHWIVTDIPGTTDCSFGREIVGYEMPRPNIGIHRFVFLLFKQKKRQTVLTAPLSRDRFNTRKFSEENELGSPVAAVFFNCQRETAARRR

SEQ ID NO: 360 - protein, 175 aa, Nicotiana sylvestris
MGSKMSDPLVIGRVIGEVVDYFTPSVKMSVTYNSSKHVYNGHELFPSSVTSKPRVEVHGGDLRSFFTMIMIDPDVPGPSDPYLREHLHWIVTDIPGTTDCSFGKEIVGYEMPRPNIGIHRFVFLLFKQKKRQTVLTAPLSRDRFNTRKFAEENELGSPVAAVFFNCQRETAARRR

SEQ ID NO: 361 - protein, 175 aa, Nicotiana tabacum
MGSKMSDPLVIGRVIGEVVDYFTPSVKMSVTYNSSKHVYNGHELFPSSVTSKPRVEVHGGDLRSFFTLIMIDPDVPGPSDPYLREHLHWIVTDIPGTTDCSFGREIVGYEMPRPNIGIHRFVFLLFKQKKRQTLLSAPLSRDRFNTRKFSEENELGSPVAAAFFNCQRETAARRR

SEQ ID NO: 362 - protein, 175 aa, Nicotiana tomentosiformis
MGSKMSDPLVIGRVIGEVVDYFTPSVKMSVTYNSSKHVYNGHELFPSSVTSKPRVEVHGGDLRSFFTLIMIDPDVPGPSDPYLREHLHWIVTDIPGTTDCSFGREIVGYEMPRPNIGIHRFVFLLFKQKKRQTLLSAPLSRDRFNTRKFSEENELGSPVAAVFFNCQRETAARRR

SEQ ID NO: 363 - protein, 173 aa, Papaver somniferum
MAKMLEPLSVGRVIGDVLDSFTPTVKMSVTYNCNKQVCNGHELFPSTVTAKPKVEVHGGDMRSFFTLIMTDPDVPGPSDPYLREHLHWIVTDIPGTTDATFGREVVSYEMPKPNIGIHRFVFALFKQKRRQSVSSPSSRDHFNTRKFAEANELGLPVAAVFFNAQRETAARRR

SEQ ID NO: 364 - protein, 173 aa, Papaver somniferum
MAKMLEPLLVGRVIGDVLDSFTPTIKMSVTFNCNKQVCNGHELFPSTVTTKPKVEVHGGDMRSFFTLIMTDPDVPGPSDPYLREHLHWIVTDIPGTTDATFGKEVVSYEMPKPNIGIHRFVFALFKQKRRQSVSSPSSRDHFNTRKFAEANELGLPVAAVFFNAQRETAARRR

SEQ ID NO: 365 - protein, 173 aa, Parasponia andersonii
MARMPSEPLVVGRVIGDVLDSFTPTIKMSVSYNKKQVCNGHELFPSAVTTKPRVEIQGADMRSFFTLVMTDPDFPGPSDPYLREHLHWIVTDIPGTTDATFGREVVSYEIPKPNIGIHRFVFVLFKQKCRDSVTPPPSRDQFNTKNFAAQNDLGLPVAAVYFNAQRETAARRR

SEQ ID NO: 366 - protein, 173 aa, Persea americana
MARMLEPLIVGRVVGEVLDPFTPSLRMTVTYNSNKQVCNGHELYPSSVASRPRVEIQGGDLRSFFTLVMTDPDVPGPSDPYLREHLHWIVTDIPGTTDATFGREVVGYEIPRPNIGIHRFVFVLFKQKRRQAIHPPSTRDHFSTRRFAQDNDLGLPVAAVFFNAQRETAARRR

SEQ ID NO: 367 - protein, 173 aa, Phaseolus vulgaris
MARMPLEPLIVGRVIGEVLDSFTTSMKMTVSYNKKQVYNGHELFPSSVNTKPKVQIEGADMRSFFTLIMTDPDVPGPSDPYLREHLHWIVTDIPGTTDATFGKELVSYEIPKPNIGIHRFVFVLFKQKRRQCVTPPTSRDHFNTRNFAAQNDLGLPVAAVYFNAQRETAARRR

SEQ ID NO: 368 - protein, 170 aa, Phaseolus vulgaris
MPLEPLIVGRVIGEVLDSFTTSMKMTVSYNKKQVYNGHELFPSSVNTKPKVQIEGADMRSFFTLIMTDPDVPGPSDPYLREHLHWIVTDIPGTTDATFGKELVSYEIPKPNIGIHRFVFVLFKQKRRQCVTPPTSRDHFNTRNFAAQNDLGLPVAAVYFNAQRETAARRR

SEQ ID NO: 369 - protein, 220 aa, Phaseolus vulgaris
MGKHSTLKGIINMELTLLFSAGYRLVFLTLTLLTFFSLYLYPYHTLVMARMPLEPLIVGRVIGEVLDSFTTSMKMTVSYNKKQVYNGHELFPSSVNTKPKVQIEGADMRSFFTLIMTDPDVPGPSDPYLREHLHWIVTDIPGTTDATFGKELVSYEIPKPNIGIHRFVFVLFKQKRRQCVTPPTSRDHFNTRNFAAQNDLGLPVAAVYFNAQRETAARRR

SEQ ID NO: 370 - protein, 173 aa, Populus balsamifera
MANLSDPLVVGRVIGDVIDYFTQNVKMTVTYNSNKQVYNGHELFPSAVTHKPKVEVHGGDMRSFFTLVMTDPDVPGPSDPYLREHLHWIVTDIPGTTDATFGREVVNYEMPRPNIGIHRFVYLLFRQKGRQTVSTPSSRDKFNTRKFAEENELDLPVAAVFFNAQRETAARRR

SEQ ID NO: 371 - protein, 173 aa, Populus euphratica
MANLSDPLVVGRVIGDVIDYFTPNVKMTVTYNSNKQVYNGHELFPSAVTHKPKVEVHGGDMRSFFTLVMTDPDVPGPSDPYLREHLHWIVTDIPGTTDATFGREVVSYEMPRPNIGIHRFVYILFRQKGRQTVSTPSSRDKFNTRKFAEENELDLPVAAVFFNAQRETAARRR

SEQ ID NO: 372 - protein, 173 aa, Populus nigra
MANLSDPLVVGRVIGDVIDYFTPNVKMTVTYNSNKQVYNGHELFPSAVTHKPKVEVHGGDMRSFFTLVMTDPDVPGPSDPYLREHLHWIVTDIPGTTDATFGREVVNYEMPRPNIGIHRFVYLLFRQKGRQTVSTPSSRDKFNTRKFAEENELDLPVAAVFFNAQRETAARRR

SEQ ID NO: 373 - protein, 173 aa, Populus trichocarpa
MANLSDPLVVGRVIGDVIDYFTPNVKMTVTYNSNKQVYNGHELFPSAVTHKPKVEVHGGDMRSFFTLIMTDPDVPGPSDPYLREHLHWIVTDIPGTTDATFGREVVNYEMPRPNIGIHRFVYLLFRQKGRQTVSTPSSRDKFNTRKFAEENELDLPVAAVFFNAQRETAARRR

SEQ ID NO: 374 - protein, 174 aa, Populus trichocarpa
MAKMSEPLVVGRVIGDVIDHFTANVKMTVTYQSNRKQVFNGHELFPSAVTHKPKVEVHGGDMRSFFTLVMTDPDVPGPSDPYLREHLHWIVTDIPGTTDATFGREVMNYEMPRPNIGIHRFVFLLFKQKGRQTVTTPASRDKFNTRKFAEENELGLPVAAVFFNAQRETAARKR

SEQ ID NO: 375 - protein, 172 aa, Prunus avium
MARTSEPLVVGRVIGDVLDCFTPTTKMSVTYNTKLVCNGYELYPSAVTTKPRVEIQGGDMRTFFTLIMTDPDVPGPSDPYLREHLHWIVTDIPGTTDATFGREVVSYEMPRPNIGIHRFVFVLFKQKRRQSVNPPSSRDHFSARSFAAENDLGLPVAAVYFNCQRETAARRR

SEQ ID NO: 376 - protein, 173 aa, Prunus avium
MAKMSDPLVVGRVIGDVVDYFSQSVKMTVTYNSNKKVYNGHELFPSTLTLKPKVEVHGGDLRSFFTLVMTDPDVPGPSDPYLREHLHWIVNDIPGTTDNTFGKEVVKYEIPRPNIGIHRFVFLLFKQKGRQTVIPPPSKDHFNTRKFAEANDLGLPVAAVFFNAQRETAARRR

SEQ ID NO: 377 - protein, 173 aa, Prunus mume
MAKMSDPLVVGRVIGDVVDSFSQSVKMTVTYNSNKKVYNGHELFPSSLTLKPKVEVHGGDLRSFFTLVMTDPDVPGPSDPYLREHLHWIVNDIPGTTDTTFGKEMVKYEIPRPNIGIHRFVFLLFKQKGRQTVIPPPSKDHFNTRKFAEANDLGLPVAAVFFNAQRETAARRR

SEQ ID NO: 378 - protein, 174 aa, Prunus mume
MAKMSDPLVVGRVIGDVVDSFSQSVKMTVTYNSNKKVYNGHELFPSSLTLKPKVEVHGGDLRSFFTLVMTDPDVPGPSDPYLREHLHWIVNDIPGTTDTTFAGKEMVKYEIPRPNIGIHRFVFLLFKQKGRQTVIPPPSKDHFNTRKFAEANDLGLPVAAVFFNAQRETAARRR

SEQ ID NO: 379 - protein, 173 aa, Prunus persica
MAKMSDPLVVGRVIGDVVDSFSQSVKMTVTYNSNKKVYNGHELFPSSLTLKPKVEVHGGDLRSFFTLVMTDPDVPGPSDPYLREHLHWIVTDIPGTTDNTFGKEVVKYEIPRPNIGIHRFVFLLFKQKGRQTVIPPPSKDNFNTRKFAEANDLGLPVAAVFFNAQRETAARRR

SEQ ID NO: 380 - protein, 174 aa, Prunus persica
MAKMSDPLVVGRVIGDVVDSFSQSVKMTVTYNSNKKVYNGHELFPSSLTLKPKVEVHGGDLRSFFTLVMTDPDVPGPSDPYLREHLHWIVTDIPGTTDNTFAGKEVVKYEIPRPNIGIHRFVFLLFKQKGRQTVIPPPSKDNFNTRKFAEANDLGLPVAAVFFNAQRETAARRR

SEQ ID NO: 381 - protein, 172 aa, Prunus serotina
MARMSEPLVVGRVIGDVLDCFTPTTKMSVTYNTKLVCNGYELYPSAVTNKPRVEIQGGDMRTFFTLVMTDPDVPGPSDPYLREHLHWIVTDIPGTTDATFGREVVSYEMPRPNIGIHRFVFVLFKQKRRQSVNPPSSRDHFSARSFAAENDLGLPVAAVYFNCQRETAARRR

SEQ ID NO: 382 - protein, 173 aa, Prunus yedoensis var. nudiflora
MAKMSDPLVVGRVIGDVVDYFSQSVKMTVTYNSNKKVYNGHELFPSSLTLKPKVEVHGGDLRSFFTLVMTDPDVPGPSDPYLREHLHWIVNDIPGTTDNTFGKEVVKYEIPRPNIGIHRFVFLLFKQKGRQTVIPPPSKDHFNTRKFAEANDLGLPVAAVFFNAQRETAARRR

SEQ ID NO: 383 - protein, 172 aa, Punica granatum
MSRVLEPLMVGRVIGDVLDSFTPSTKMTVTYNGRPVCNGHELYPSAVSTKPRVEIHGGDMRSFFTLVMTDPDAPGPSDPFQREHLHWIVTNIPGSTDASFGREAVNYEIPRPNIGIHRFVFVLFKQKRRQTVNPPPSRDHFNTRTFAAENDLDLPVAAVYFNAQRETAARRR

SEQ ID NO: 384 - protein, 172 aa, Punica granatum
MSRVLEPLMVGRVIGDVLDSFTPSTKMTVTYNGRPVCNGHELYPSAVSTKPRVEIHGGDMRSFFTLVMTDPDAPGPSDPFQREHLHWIVTNIPGSTYASFGREAVNYEIPRPNIGIHRFVFVLFKQKRRQTVNPPPSRDHFNTRTFAAENDLDLPVAAVYFNAQRETAARRR

SEQ ID NO: 385 - protein, 174 aa, Pyrus x bretschneideri
MAMLSSDPLVVGRVIGDVVDYFSPSVKMTVSYNSNKKVYNGHELFPSSVTIKPKVEVHGGDLRSFFTLVMTDPDVPGPSDPYLKEHLHWIVTDIPGTTDNTFGIEVVKYEMPRPNIGIHRFVFLLFKQKGRQTVIPPASKDHFNTRKFAEANDLGLPVTAVFFNAQRETAARRR

SEQ ID NO: 386 - protein, 174 aa, Pyrus x bretschneideri
MAMLSSDPLVVGRVIGDVVDYFSPSVKMTVSYNSNKKVYNGHELFPSSVTIKPKVEVHGGDLRSFFTLVMTDPDVPGPSDPYLKEHLHWIVTDIPGTTDNTFGIEVVKYEMPRPNIGIHRFVFLLFKQKGRQTVIPPTSKDHFNTRKFAEANDLGLPVTAVFFNAQRETAARRR

SEQ ID NO: 387 - protein, 174 aa, Pyrus x bretschneideri
MAMMSSDPLVVGRVIGDVVDYFSSSVRMTITYNSNKVVYNGHELFPSSVTIKPKVEVHGGDLRSFFTLVMTDPDVPGPSDPYLKEHLHWIVTDIPGTTDNTFGKEVVKYEMPRPNIGIHRFVFLLFKQKGWQTVIPPASKDHFNTRKFAEANDLGLPVTAVFFNAQRETAARRR

SEQ ID NO: 388 - protein, 172 aa, Quercus suber
MARISEPLIVGRVIGDVLDSFTPSIKMSITYNNKQVCNGHEFYPSTVTNKPRVEVQGGDMRSFFTLVMTDPDVPGPSDPYLREHLHWIVTDIPGTTDATFGREVVSYEIPRPNIGIHRFVFVLFKQKRRQSVTPPSSRDHFNTRSFAAENDLGLPVAAVYFNAQRETAARRR

SEQ ID NO: 389 - protein, 188 aa, Quercus suber
MAKVSDPLVVGRVIGDVIESFSPTVKMTVTYNSNVKDIKSNSSQGQSLKQVYNGHELFPSAVTMKPKVEVHGGDMRSFFTLIMTDPDVPGPSDPYLREHLHWIVTDIPGTTDASFGREVVNYEMPRPNIGIHRFVFLLFKQNRRETVITVPSSRDRFSTRKFAEENELGLPVSAVFFNAQRETAARRR

SEQ ID NO: 390 - protein, 177 aa, Raphanus sativus
MENMGARVIEPLIMGRVVGDVLDFFTPTIKMNVSYNKKQVSNGHELLPSSVSSKPRVEIHGGDLRSFFTLVMIDPDVPGPSDPFQKEHLHWIVTNIPGTTDATFGKEVVSYELPRPSIGIHRFVFVLFKQKQRRVIFPNIPSRDHFNTRKFAIEYDLGLPVAAVFFNAQRETAARRR

SEQ ID NO: 391 - protein, 178 aa, Raphanus sativus
MEHMGTRVIEPLRVGGVVGDVLDNFTPTIRMNVSYNKKQVSNGHELFPSAVSSKPRVEIHDGDLRSFFTLVMTDPDVPNPSDPFLKEHLHWLVMNIPGTTDATFGKEVVSYELPKPNIGIHRYVFVLFRQKQRRVMLPSNILSRDQFNTREFAIENDLGLPVAAVFFNAQRETASRRR

SEQ ID NO: 392 - protein, 175 aa, Raphanus sativus
MARISSDPLMVGRVIGDVVDNCLQAVKMTVTYNSDKQVYNGHELFPSVVTNKPKVEVHGGDMRSFFTLVMTDPDVPGPSDPYLREHLHWIVTDIPGTTDVTFGKEIVGYEMPRPNIGIHRFVYLLFKQNRRGSVISVPSYRDQFNTRMFAHENDLGLPVAAVFFNCQRETAARRR

SEQ ID NO: 393 - protein, 178 aa, Raphanus sativus
MARISSDPLMVGRVIGDVVDNCLQAVKMTVTYNSDKQVYNGHELFPSVVTNKPKVEVHGGDMRSFFTLEHSVMTDPDVPGPSDPYLREHLHWIVTDIPGTTDVTFGKEIVGYEMPRPNIGIHRFVYLLFKQNRRGSVISVPSYRDQFNTRMFAHENDLGLPVAAVFFNCQRETAARRR

SEQ ID NO: 394 - protein, 148 aa, Raphanus sativus
MTVTYNCDKQVYNGHELFPSAVTNKPKVEVHGGDMRSFFTLVMTDPDVPGPSDPYLREHLHWIVTDIPGTTDVTFGNEIVGYEMPRPNIGIHRFVYLLFKQNRRGSVVSVPSYRDQFNTRMFAHENDLGLPVAAVFFNCQRETAARRR

SEQ ID NO: 395 - protein, 172 aa, Rosa chinensis
MARMSEPLVVGRVIGDVLDYFTPTTKMIVTYSTKLVFNGHELFPSAVTAKPRVEIQGGDMRSFFTLVMTDPDVPGPSDPYLKEHLHWIVTDIPGTTDVTFGREMVSYEMPRPNIGIHRFVFVLFKQKRRQSVNPPSSRDHFNTRSFAAENDLGLPVAAVYFNAQRETAARRR

SEQ ID NO: 396 - protein, 172 aa, Rosa chinensis var. spontanea
MARISEPLVVGRVIGDVLDYFTPNTKMIVTYSTKLVFNGHELFPSAVTAKPRVEIQGGDMRSFFTLVMTDPDVPGPSDPYLKEHLHWIVTDIPGTTDVTFGREMVSYEMPRPNIGIHRFVFVLFKQKRRQSVNPPSSRDHFNTRSFAAENDLGLPVAAVYFNAQRETAARRR

SEQ ID NO: 397 - protein, 172 aa, Rosa rugosa
MARMSEPLVVGRVIGDVLDYFTPTTKMIVTYNTKLVFNGHELYPSAVTAKPRVEIQGGDMRSFFTLVMTDPDVPGPSDPYLKEHLHWIVTDIPGTTDVTFGREMVSYEMPRPNIGIHRFVSVLFKQKRRQSVNPPSSRDHFNTRCFAAENDLGLPVAAVYINAQRETAARRR

SEQ ID NO: 398 - protein, 172 aa, Rubus idaeus
MARMSEPLVVGRVIGDVLDSFTPTTKMIVTYTTRHVSNGYELLPSAVTTKPRVEIQGGDMRSFFTLVMTDPDAPGPSDPYLKEHLHWVVTDIPGTTDATFGREVVSYEMPRPNIGIHRFVFVLFRQKRRQSVNPPSSRDHFNTRSFAAENDLGLPVAAVYFNAQRETAARRR

SEQ ID NO: 399 - protein, 176 aa, Sesamum indicum
MAKMSSDPLVIGRVVGDVVDHFSSTVKMSVTYNSNKHVYNGHELFPSTVTSKPRVEVHGGDMRSFFTLIMTDPDVPGPSDPYLREHLHWIVTDIPGTTDSSFGKEVVSYEMPRPNIGIHRFAFVLFKQKKRQLGCVRAPACRDGFNTRNFAQENELGLPVAAVYFNCQRETAARRR

SEQ ID NO: 400 - protein, 176 aa, Sesamum indicum
MAKMSSDPLVIGRVVGDVVDHFSSTVKMSVTYNSNKHVYNGHELFPSTVTSKPRVEVHGGDMRSFFTLIMTDPDVPGPNDPYLREHLHWIVTDIPGTTDSSFGKEVVSYEMPRPNIGIHRFAFVLFKQKKRQLGCVRAPACRDGFNTRNFAQENELGLPVAAVYFNCQRETAARRR

SEQ ID NO: 401 - protein, 175 aa, Solanum tuberosum
MASKMCEPLVIGRVIGEVVDNFCPSVKMSVVYNNNKHVYNGHEFFPSSVTSKPRVEVHGGDLRTFFTLVMIDPDVPGPSDPYLREHLHWIVTDIPGTTDCSFGREVVGYEMPRPNIGIHRFVFLLFKQKKRQTISSAPVSRDQFSSRKFSEENELGSPVAAVFFNCQRETAARRR

SEQ ID NO: 402 - protein, 199 aa, Tarenaya hassleriana
MCLKHHTISLSLSLSRLKMENMGGSRAIEPLIVGRVIGDVLDFFTPSIKMTVSYSKKQVCNGHELLPSSLSSAPRVHIHGADLRSFFTLVMVDPDVPGPSDPYLREHLHWIVTNIPGTTDATFGKEVVSYEVPRPSIGIHRYVFVLFKQRQRHVVTSTTNSVPSRDHFNTRRFVAEHDLGLPVAAVYFNAQRETAARRR

SEQ ID NO: 403 - protein, 175 aa, Tarenaya hassleriana
MARISSDPLVVGRVIGDVVDNVTQAVKMTVTYNSNKQVYNGHEFFPSAVTIKPKVDVHGGDMRSFFTLVMTDPDVPGPSDPYLREHLHWIVTDIPGTTDATFGQEIVGYEMPRPNIGIHRFVFMLFKQKRRGSVVSVPSYRDQFNTRMFAHENDLGLPVAAVFFNCQRETAARRR

SEQ ID NO: 404 - protein, 175 aa, Tarenaya hassleriana
MARMYSDPLVVGGVIGDIVDNVTHVVKMTVTYGSSKQVYNGHELLPSTVANKPKVEVHGCDMRSFFTLVMTDPDVPGPSDPYLREHLHWIVTDIPGTTDATFGKEMIGYEMPRPNIGIHRFVFMLFKQKRRSSVVSVPSYRDQFNTRIFAQENDLGLPVAAVFFNCQRETASRRR

SEQ ID NO: 405 - protein, 174 aa, Theobroma cacao
MAKLSDPLVVGRVIGDVIDAITPSVKMTVTFNANKQVYNGHELFPSSVTNKPKVDVHGGDMRSFFTLVMTDPDVPGPSDPYLREHLHWIVTDIPGTTDATFGREVVNYEMPRPNIGIHRFVFLLFKQKRRQAVISTPSSRDHFNTRKFAEENELGLPVAAVYFNAQRETAARRR

SEQ ID NO: 406 - protein, 173 aa, Trema orientale
MARMSSEPLVVGRVIGDVLDSFTATIKMSVSYNKKQVCNGHELFPSAVTTRPRVEIQGADMRSFFTLVMTDPDVPGPSDPYLREHLHWIVTDIPGTTDATFGREVVSYEIPKPNIGIHRFVFVLFKQKCRDSVTPPPSRDHFNTKNFAAQNDLGLPVAAVYFNAQRETAARRR

SEQ ID NO: 407 - protein, 174 aa, Trema orientale
MAKISDPLVLGRVIGDVVDPFSPSLRISVTYNSNKKVYNGHELFPSSVTIKPKVEVHGGDMRSFFTLVMTDPDVPGPSDPYLREHLHWIVTDIPGTTDVSFGSEIVSYEMPRPNIGIHRFVFLVFKQKGRQTLVSTPPSRDRFNTRKFAEDNDLGLPVAAVFFNAQRETACRKR

SEQ ID NO: 408 - protein, 173 aa, Vaccinium corymbosum
MARMSAEPLIVGRVIGDVLDPFTPTVKMLATYNNRQVSNGHEFYPSQVTTKPRVEIHGGDMRTFFTLVMTDPDVPGPSDPYLREHLHWIVTDIPGTTDATFGREVVSYEIPRPNIGIHRFVFVLFKQKSRQAISPPSSRDHFTTRCFAEENDLGLPVAAVFFNAQRETAARRR

SEQ ID NO: 409 - protein, 175 aa, Vigna angularis
MNMISTDPLVIGRVIGDVVDLFSPTVKITVSYNNNKQVYNGHEFFPSSVTNKPKVQIRGGDMRSFFTLLMTDPDVPGPSDPYLREHLHWIVTDIPGTTDTTFGNEVVNYEIPRPNIGIHRFVFLLFKQKCRQAVMKIPSSRDLFNTRSFAEENDLGLPVAAVFFNAQRETAARRR

SEQ ID NO: 410 - protein, 276 aa, Vigna angularis
MNMISTDPLVIGRVIGDVVDLFSPTVKITVSYNNNKQVYNGHEFFPSSVTNKPKVQIRGGDMRSFFTLVPSSSFTPPSFITSIFSCIISKKSSVPPSKSVAMNMISTDPLVIGRVIGDVVDLFSPTVKITVSYNNNKQVYNGHEFFPSSVTNKPKVQIRGGDMRSFFTLLMTDPDVPGPSDPYLREHLHWIVTDIPGTTDTTFGNEVVNYEIPRPNIGIHRFVFLLFKQKCRQAVMKIPSSRDLFNTRSFAEENDLGLPVAAVFFNAQRETAARRR

SEQ ID NO: 411 - protein, 173 aa, Vigna unguiculata
MARMPLEPLIVGRVIGEVLDSFTTSTKMTVSYNKKQVYNGHEFFPSSINIKPKVEIEGGDMRSFFTLIMTDPDVPGPSDPYLREHLHWIVTDIPGTTDATFGKELVSYEIPKPNIGIHRFVFVLFKQKRRQCVTPHSSRDHFNTRNFAAQNELGLPVAAVYFNAQRETAARRR

SEQ ID NO: 412 - protein, 173 aa, Vigna unguiculata
MARMPLEPLIVGRVIGEVLDSFTTSTKMTVSYNKKQVYNGHEFFPSSINIKPKVEIEGGDMRSFFTLIMTDPDVPGPSDPYLREHLHWIVTDIPGTTDATFGKELVSYEIPKPNIGIHRFVFVLFKQKRRQCVTPPSSRDHFNTRNFAAQNELGLPVAAVYFNAQRETAARRR

SEQ ID NO: 413 - protein, 173 aa, Vitis californica
MARMSDPLIVGRVIGDVVDSFCSTVKMTVTYNSNKQVYNGHELFPSSVTIKPKIEVEGGDMRSFFTLIMTDPDVPGPSDPYLREHLHWIVTDIPGTTDSTFGREIVNYEMPRPNIGIHRFVFLLFKQKRRQTVNPPSSRDRFSTRNFAGENELGPPVAAVFFNAQRETAARKR

SEQ ID NO: 414 - protein, 172 aa, Vitis vinifera
MARILEPLIVGRVIGDVLDPFPPTIKMTVTYHNKQICNGYELYPSSITVKPRVEVQGGDLRSFFTLVMTDPDVPGPSDPYLREHLHWIVTDIPGTTDATFGREVLSYEIPKPNIGIHRFVFVLFKQKRRQTVNTPTSRDHFNTRSFAAENDLGLPVAAVFFNAQRETAARRR

SEQ ID NO: 415 - protein, 173 aa, Vitis vinifera
MARMSDPLIVGRVIGDVVDSFCSTVKMTVTYNSNKQVYNGHELFPSSVTIKPKIEVEGGDMRSFFTLIMTDPDVPGPSDPYLREHLHWIVTDIPGTTDSTFGREIVNYEMPRPNIGIHRFVFLLFKQKRRQTVNPPSSRDRFSTRNFAEENELGPPVAAVFFNAQRETAARKR

SEQ ID NO: 416 - protein, 173 aa, Vitis vinifera
MARMSDPLIVGRVIGDVVDSFCSTVKMTVTYNSNKQVYNGHELFPSSVTIKPKIEVEGGDMRSFFTLIMTDPDVPGPSDPYLREHLHWIVTDIPGTTDSTFGREIVNYEMPRPNIGIHRFVFLLFKQKRRQTVNPPSSRDRFSSRNFAEENELGPPVAAVFFNAQRETAARKR

SEQ ID NO: 417 - protein, 173 aa, Vitis vinifera
MARMTDPLIVGRVIGDVVDSFCSTVKMTVTYNSNKQVYNGHELFPSSVTIKPKIEVEGGDMRSFFTLIMTDPDVPGPSDPYLREHLHWIVTDIPGTTDSTFGREIVNYEMPRPNIGIHRFVFLLFKQKRRQTVNPPSSRDRFSTRTFAEENELGPPVAAVFFNAQRETAARKR

SEQ ID NO: 418 - protein, 172 aa, Ziziphus jujuba
MARISEPLIVGRVIGDVLDSFTPTIKMSVTYNSKQVCNGHELFPSNVTSKPRVEIQGGDMRSFFTLIMTDPDVPGPSDPYLREHLHWMVTDIPGTTDATFGSEMVSYEIPRPNIGIHRFVFVLFKQKRRQSVNPPSSRDHFSTRDFAAQNDLGLPVAAVFFNAQRETAARRR

SEQ ID NO: 419 - protein, 181 aa, Antirrhinum majus
MAAKVSSDPLVIGRVIGDVVDHFTSTVKMSVIYNSNNSIKHVYNGHELFPSAVTSTPRVEVHGGDMRSFFTLIMTDPDVPGPSDPYLREHLHWIVTDIPGTTDSSFGKEVVSYEMPRPNIGIHRFVFLLFKQKKRGQAMLSPPVVCRDGFNTRKFTQENELGLPVAAVFFNCQRETAARRR

SEQ ID NO: 420 - protein, 172 aa, Actinidia chinensis var. chinensis
MATSTDPLVVCRIIGDVVDMFVPSITMNVYYGPKHVTNGCTIKPSMAINPPRVTITGHSHELYTLVMTDPDAPSPSEPSMREWVHWIVTDIPGDSNPTRGNEILPYMAPRPPVGIHRCILLLFQQKGPLELVEQPMSRANFSTRAFSHQLDLGMPVATVYFNAQKEPMNRKH

SEQ ID NO: 421 - protein, 214 aa, Actinidia chinensis var. chinensis
MHALLLYFVYKSLSSLWPFPTIYCLRNLLSSFLPLPFCTSPHMATSTDPLVVCRIIGDVVDMFVPSITMNVYYGPKHVTNGCTIKPSMAINPPRVTITGHSHELYTLVMTDPDAPSPSEPSMREWVHWIVTDIPGDSNPTRGNEILPYMAPRPPVGIHRCILLLFQQKGPLELVEQPMSRANFSTRAFSHQLDLGMPVATVYFNAQKEPMNRKH

SEQ ID NO: 422 - protein, 172 aa, Actinidia chinensis var. chinensis
MAASVDPLVVGRVIGDVVDMFVPTVTMHVYFGSRHVTNGCDIKPSVANNPPRVTISGHPQQLYTLVMTDPDAPSPSEPSLREWAHWIVTDIPGGSSPTQGKEVLPYMGPNPPVGIHRYILVLFQQKSPLEAVDQPISRAHFNTRTFAHQMGLGLPVATVYFNAHKEPANRRR

SEQ ID NO: 423 - protein, 177 aa, Agapanthus praecox subsp. orientalis
MHMASCVDPLVVGRVIGEVVDLFVPTLTMSVSYGSKHINNGCDVKPSIAAEPPTVNLGGRMSELYTLVMIDPDAPSPSDPTMREWVHWVVVNIPGGTDPSQGQEVVPYMGPRPPLGIHRYVLVLFRQKAGLPVITPPESRANFNTRYFAARYDLGLPVATVYFNAQKEPASRRRRHI

SEQ ID NO: 424 - protein, 173 aa, Arabidopsis thaliana
MAASVDPLVVGRVIGDVLDMFIPTANMSVYFGPKHITNGCEIKPSTAVNPPKVNISGHSDELYTLVMTDPDAPSPSEPNMREWVHWIVVDIPGGTNPSRGKEILPYMEPRPPVGIHRYILVLFRQNSPVGLMVQQPPSRANFSTRMFAGHFDLGLPVATVYFNAQKEPASRRR

SEQ ID NO: 425 - protein, 176 aa, Arachis duranensis
MCMMGASVDPLVVGRVIGDVIDMFVPSVGMSVYYGSKHVTNGCDIKPSMATSPPKVTLTGGNIHSLYTLVMTDPDAPSPSEPTMREWLHWVVVDIPGGTNPTQGKEIVAYMGPRPPVGIHRYILILFEQKEVLGGVEQPAARASFNTRYFARQFNLGLPVATVYFNSQKEPASKRR

SEQ ID NO: 426 - protein, 176 aa, Arachis hypogaea
MCMMGASVDPLVVGRVIGDVIDMFVPSVGMSVYYGSKHVTNGCDIKPSMAISPPKVTLTGGNIHSLYTLVMTDPDAPSPSEPTMREWLHWVVVDIPGGTNPTQGKEIVAYMGPRPPVGIHRYILILFEQKGVLGGVEQPAARASFNTRYFARQFNLGLPVATVYFNSQKEPASKRR

SEQ ID NO: 427 - protein, 176 aa, Arachis ipaensis
MCMMGASVDPLVVGRVIGDVIDMFVPSVGMSVYYGSKHVTNGCDIKPSMATNPPKVTLTGGNIHSLYTLVMTDPDAPSPSEPTMREWLHWVVVDIPGGANPNQGKEIVAYMGPRPPVGIHRYILILFEQKGVLGGVEQPATRANFNTRYFARQFNLGLPVATVYFNSQKEPASKRR

SEQ ID NO: 428 - protein, 174 aa, Brassica napus
MMAASVDPLVVGRVIGDVLDMYIPTANMSVYVGPKHITNGCEIKPSVAVNPPKVNISGNSDELYTLVMTDPDAPSPSEPNMREWVHWIVVDIPGGTNPSKGKEILPYMEPKPPVGIHRYIFVLFRQISPVGLMVQQPPSRANFSTRMFAGHLDLGLPVATVYFNAQKEPASRRR

SEQ ID NO: 429 - protein, 174 aa, Brassica napus
MAAASVDPLVVGRVIGDVLDMYIPTANMSVYVGPKHITNGCEIKPSVAVNSPKVNISGNSDELYTLVMTDPDAPSPSEPNMREWVHWIVVDIPGGTNPSKGKEILPYMEPKPPVGIHRYIFVLFRQISPVGLMVQQPPSRANFSTRMFAGHLDLGLPVATVYFNAQKEPASRRR

SEQ ID NO: 430 - protein, 173 aa, Brassica oleracea var. oleracea
MAASVDPLVVGRVIGDVLDMFIPTANMSVYFGPKHITNGCEIKPSAAVNPPKVSISGNSNELYTLVMTDPDAPSPSEPNMREWVHWIVVDIPGGTNPSKGKEILPYMEPRPPVGIHRYIFVLFRQNSPVGMMVQQPPSRANFSTRMFAGHLDLGLPVATVYFNAQKEPASRRR

SEQ ID NO: 431 - protein, 174 aa, Brassica oleracea var. oleracea
MAAASVDPLVVGRVIGDVLDMYIPTANMSVYVGPKHITNGCEIKPSVAVNPPKVNISGNSDELYTLVMTDPDAPSPSEPNMREWVHWIVVDIPGGTNPSKGKEILPYMEPKPPVGIHRYIFVLFRQISPVGLMVQQPPSRANFSTRMFAGHLDLGLPVATVYFNAQKEPASRRR

SEQ ID NO: 432 - protein, 160 aa, Brassica oleracea var. oleracea
MAASVDPLVVGRVIGDVLDMFIPTANMSVYFGPKHITNGCEIKPSAAVNPPKVMTDPDAPSPSEPNMREWVHWIVVDIPGGTNPSKGKEILPYMEPRPPVGIHRYIFVLFRQNSPVGMMVQQPPSRANFSTRMFAGHLDLGLPVATVYFNAQKEPASRRR

SEQ ID NO: 433 - protein, 173 aa, Brassica rapa
MAASVDPLVVGRVIGDVLDMFIPTANMSVYFGPKHITNGCEIKPSAAVNPPKVNISGNSNELYTLVMTDPDAPSPSEPNMREWVHWIVVDIPGGTNPSKGKEILPYMEPRPPVGIHRYIFVLFRQNSPVGMMVQQPPSRANFSTRMFAGHLDLGLPVATVYFNAQKEPASRRR

SEQ ID NO: 434 - protein, 173 aa, Brassica rapa
MAASVDPLVVGRVIGDVLDMYIPTANMSVYVGPKHITNGCEIKPSAAVKPPKVNISGNPDELYTLVMTDPDAPSPSEPNMREWVHWIVVDIPGGTNPSKGKEILPYMEPKPPVGIHRYIFVLFRQISPVGLMVQQPPSRANFSTRMFAGHLDLGLPVATVYFNAQKEPASRRR

SEQ ID NO: 435 - protein, 173 aa, Brassica rapa
MAASVDPLVVGRVIGDVLDMYIPTANMSVYVGPKHITNGCEIKPSAAVKPPKVNISGNPDELYTLVMTDPDAPSPSEPNMREWVHWIVVDIPGGTNPSKGKEILPYMEPKPPVGIHRYIFVLFRQISPVGLMVQQPPSRANFSTRMFAGHLDLGLPVATVYFNAQKEPASGRR

SEQ ID NO: 436 - protein, 187 aa, Cajanus cajan
MRSFSLTLFLCIASVAFMAASVDPLVVGRVIGDVVDMFIPSVNMSLYFGSKHVTNGCDIKPSIAISPPKITLTGNMDNLYTLVMTDPDAPSPSEPSMRELIHWIVVNIPGGTNPTRGKEILPYLGPKPPVGIHRFIFVLFQQKGPLAAVEQPTTRAGFNTRYFASQLDLGLPVATVYFNAQKEPKRR

SEQ ID NO: 437 - protein, 173 aa, Camelina sativa
MAASIDPLVVGRVIGDVLDMFIPTANMSVYFGPKHITNGCEIKPSTTLNPPKVNISGHSDELYTLVMTDPDAPSPSEPSLREWVHWIVVDIPGGTNPSKGKEILPYMEPKPPVGIHRYIFVLFRQNSPVGLMVQQPLSRANFSTRMFAGHLDLGLPVATVYFNAQKEPASRRR

SEQ ID NO: 438 - protein, 173 aa, Camelina sativa
MAASVDPLVVGRVIGDVLDMFIPTATMSVYFGPKHITNGCEIKPSTTLNPPKVNISGHSDELYTLVMTDPDAPSPSEPSLREWVHWIVVDIPGGTNPSKGKEILPYMEPKPPVGIHRYIFVLFRQNSPVGLMVQQPLSRANFSTRMFAGHLDLGLPVATVYFNAQKEPASRRR

SEQ ID NO: 439 - protein, 173 aa, Capsella rubella
MAASVDPLVVGRVIGDVLDMFIPTANMSVYFGPKHITNGCEIKPSTALNPPKVNISGHSDELYTLVMTDPDAPSPSEPNMREWVHWIVVDIPGGTNPSKGQEILPYMEPRPPVGIHRYILVLFRQNSPVGLMVQQPPSRANFSTRMFAGHLDLGLPVATVYFNAQKEPASRRR

SEQ ID NO: 440 - protein, 173 aa, Capsicum annuum
MAAKIDPLVVGRVIGDVVDMFVPSVTMSVHYANKHVTNGCDIKPSIATEPPKITLGGNANDFYTLVMTDPDAPSPSEPSMREWVHWIVTDIPGGSNVARGKDILGYVGPRPPVGIHRYILVLFRQKAPMSGMLQPPVARSHFCTRMFAQHLDLGVPVATVYFNAHKEPANRKR

SEQ ID NO: 441 - protein, 229 aa, Capsicum chinense
MAAKIDPLVVGRVIGDVVDMFVPSVTMSVHYANKHVTNGCDIKPSIATEPPKITLGDNANDFYTLVMTDPDAPSPSEPSMREWVHWIVTDIPGGSNVARGKDILGYVGPRPPVGIHRYILVLFRQKAPMSGMLQPPVTRSHFCTRMFAQHLDLGVPVATVYFNAHKEPTNRGVEVDRRNIGGHDMEQLQLTEDMILDRKVWRTQIRVKGRSLSITVGESTLFVSRVSCS

SEQ ID NO: 442 - protein, 167 aa, Cephalotus follicularis
MAASIDPLVVGRVIGDVVDMFIPSVSMSVYYGSKHVTNGCEIKPSIAVNPPKVTIAGHADELYALVMTDPDAPSPSEPSMREWAHWLVPVGSFTGKEMLPYMGPRPTVGIHRYILVLFQQKSTIGFVEQPQSRANFSTRCFAGHLDFGLPVATVYFNAQKEPASRRR

SEQ ID NO: 443 - protein, 173 aa, Chenopodium quinoa
MAASVDPLVVGRVIGDVVDMFVPSVSMSVYFGAKHVTNGCTIKPSIAVDPPRLLIGGHSDVLYTLVMTDPDAPSPSEPSMRELVHWIVTDIPGCASTSCGKEVVAYTGPRPPVGIHRFILVLFEQKQPLGMAVEPPISRANFNTRLFAGRHGLGLPVATVYFNAQKEPANKKR

SEQ ID NO: 444 - protein, 173 aa, Cicer arietinum
MMAASVDPLVVGRVIGDVVDMFIPSVGMSVYFGPKHVTNGCDIKPSIAINPPRVTLTGNIDNLYTLVMTDPDAPSPSEPSMRELIHWIVVDIPGGTNPKRGKEILPYIGPKPPVGIHRFILVLFKQKGPMGLVEQPTSRVSFNTRYFASQLDLGLPVATVYFNSQKEPQAKRR

SEQ ID NO: 445 - protein, 172 aa, Citrus clementina
MAASVDPLVVGRVIGDVVDMFVPSVGMSVYYGSKHVTNGCDVKPSMATSPPKLNITGHSDELYTLVMTDPDAPSPSEPRMREWVHWIVVDIPGGTNPAQGMEILPYMGPRPPVGIHRYIMVLFQQKAPLGLVEQPPTRANFNTRLFAGNLDLGLPVATIYFNCQKEPASRRR

SEQ ID NO: 446 - protein, 173 aa, Corchorus capsularis
MAVSVDPLVVGRVIGDVVDMFVPSVTMSIYYASKHVTNGCDVKPSMAINPPKVSIDGHPDHLYTLVMTDPDAPSPSEPSMREWVHWIVCDIPGGTNPTQGKEILPYMGPRPPVGIHRYIFVLFQQNGPMGTAVQPPASRANFNTRLFADHLNLGLPVATVYFNAQKEPISRRR

SEQ ID NO: 447 - protein, 173 aa, Corchorus olitorius
MAVSVDPLVVGRVIGDVVDMFVPTVTMSIYYASKHVTNGCDVKPSMAINPPKVSIDGHPDHLYTLVMTDPDAPSPSEPSMREWVHWIVCDIPGGTNPTQGKEILPYMGPRPPVGIHRYIFVLFQQNGPMGTAVQPPASRANFNTRLFADHLNLGLPVATVYFNAQKEPISRRR

SEQ ID NO: 448 - protein, 176 aa, Cucumis melo
MAASVDPLVVGRVIGDVVDMFVPTATMSVYFNSKHVTNGCDIKPSLAVNPPRLVISGHPCDLYTLVMTDPDAPSPSEPHMREWVHWIIVDIPGGANLSQGKEIVPYSGPRPPIGIHRYILLLFKQKGPIGMIDQPASRANFNTRLFARHFNLDLPVAATYFNSQKEPATKKYALAA

SEQ ID NO: 449 - protein, 176 aa, Cucumis sativus
MAASVDPLVVGRVIGDVVDMFVPTATMSVYFNSKHVTNGCDIKPSLAVNPPRLVISGHPCDLYTLVMTDPDAPSPSEPHMREWVHWIIVDIPGGANLTQGKEIVPYSGPRPPIGIHRYILLLFKQKGPIGMIDQPASRANFNTRLFARHFNLDLPVAATYFNSQKEPATKKYALAA

SEQ ID NO: 450 - protein, 172 aa, Dimocarpus longan
MAASVDPLVVGRVIGDVVDMFVPSVNMSVHYGSKHVTNGCDIKPSMAINPPKITLTGHSDELYTLIMIDPDAPSPSEPSMREWIHWMVVDIPGGTNPTRGKEILSYMGPKPPVGIHRYILVLFQQKAPLGLVEQPPTRANFNTRFFAGHLDLGLPAATIYFNAQKEPANRRR

SEQ ID NO: 451 - protein, 172 aa, Dimocarpus longan
MAASVDPLVEGRVIGDVVDMFVPSVNMSVHYGSKHVTNGCDIKPSMAINPPKITLTGHSDELYTLIMIDPDAPSPSEPSMREWIHWMVVDIPGGTNPTRGKEILSYMGPKPPVGIHRYILVLFQQKAPLGLVEQPPTRANFNTRFFAGHLDLGLPAATIYFNAQKEPANRRR

SEQ ID NO: 452 - protein, 172 aa, Durio zibethinus
MAVSVDPLVVGRVIGDVVDMFIPTVTMSVYYGSKHVTNGCDIKPSTAINPPKVSIDGHSDEFYTLVMTDPDAPSPSEPSMREWIHWIVSDIPGGTNPTQGKEILQYMGPRPPVGIHRYILVLFQQRGPLGPVQQPASRTNFNTRRFAEHLNLGLPVATVYFNAQKEPVSRRR

SEQ ID NO: 453 - protein, 175 aa, Elaeis guineensis
MASCVDPLVVGRVIGEVVDLFVPTMSMSVNYGSKHVNNGCDMKPSMAINPPTVQITGRGSDLYTLVMTDPDAPSPSEPTMREWLHWVVVNIPGGTDPSQGEEVVPYMGPRPPVGIHRYVLVLFQQKSRFSMGIGLSLPASRANFNTRAFAAQRDLGLPVAVVYFNAQKEPANRRR

SEQ ID NO: 454 - protein, 172 aa, Eucalyptus grandis
MASSVDPLVVGRVIGDVVDMFVPCVNMSVSYGSKHVTNGCDIKPSLAVNAPKISISGHPDELYTLVMVDPDAPSPSEPSMREWIHWIVVDIPGGTNPNRGKEILPYVGPRPPVGIHRYILVLFQQKTPIGHIDHPNSRANFNTRLFAAHLDLGLPVATVYFNSQKEPANRRR

SEQ ID NO: 455 - protein, 173 aa, Eutrema salsugineum
MAASVDPLVVGRVIGDVLDMFIPTANMSVYFGPKHITNGCEIKPSAAVNPPKVNISGHADELYTLVMTDPDAPSPSEPNMREWVHWIVVDIPGGTIPSRGKEILPYMEPRPPVGIHRYILVLFRQNSPVGLMVQQPPSRANFSTRMFAGHLNLGLPVATVYFNAQKEPASRRR

SEQ ID NO: 456 - protein, 171 aa, Ficus carica
MAASVDPLVVGRVIGDVVDMFIPSLSVSVYFGSRHVTNGCDIKPSLSISPPKVAISGHSDELYTLVMIDPDAPSPSEPSMREWVHWIVVDIPGGTNPNREILPYVGPRPPVGIHRYILVMFRQKGPLGLVDQPLSRANFNTRFFARHLDLGLPVATVYFNAQKEPAAKRRS

SEQ ID NO: 457 - protein, 172 aa, Fragaria vesca subsp. vesca
MAVSVDPLVVGRVIGDVVDMFVPTVNMSVYFGSKHVTNGCDIKPSIAVSPPKVTFSGHPGELYTLVMTDPDAPSPSEPSMREWVHWILADIPGGTNPIRGKEILPYVGPRPPVGIHRYILVLFQQKAPMGLVEQPPTRAHFNTRYFAAQLDLGLPVSTVYFNAQKEPANRRR

SEQ ID NO: 458 - protein, 172 aa, Fragaria x ananassa
MAVSVDPLVVGRVIGDVVDMFVPTVNMSVYFGSKHVTNGCDIKPSIAVSPPKVTFSGHPGELYTLVMTDPDAPSPSEPSMREWVHWILADIPGGTNPIRGKEILPYVGPRPPVGIHRYILVLFQQKAPIGLVEQPPTRAHFNTRYFAAQLDLGLPVSTVYFNAQKEPANRRR

SEQ ID NO: 459 - protein, 172 aa, Fragaria x ananassa
MAVSVDPLVVGRVIGDVVDMFVLTVNMSVYFGSKHVTNGCDIKPSLAVSPPTVTFSGHPGELYTLVMTDPDAPSPSEPSMREWVHWILADIPGGTNPIRGKEILPYVGPRPPVGIHRYILVLFQQKAPMGLVEQPPTRAHFNTRYFAAQLDLGPPVSTVYFNAQKEPANRRR

SEQ ID NO: 460 - protein, 190 aa, Glycine max
MRYLSLSTFSLLCITFVVMAASVDPLVVGRVIGDVVDMFIPSVNMSVYFGSKHVTNGCDIKPSIAISPPKLTLTGNMDNLYTLVMTDPDAPSPSEPSMREWIHWILVDIPGGTNPFRGKEIVSYVGPRPPIGIHRYIFVLFQQKGPLGLVEQPPTRASFNTRYFARQLDLGLPVATVYFNSQKEPAVKRR

SEQ ID NO: 461 - protein, 172 aa, Glycine max
MAASVDPLVVGRVIGDVVDMFIPSVNMSVYFGSKHVTNGCDIKPSIAISPPKLTLTGNMDNLYTLVMTDPDAPSPSEPSMREWIHWILVDIPGGTNPFRGKEIVSYVGPRPPIGIHRYIFVLFQQKGPLGLVEQPPTRASFNTRYFARQLDLGLPVATVYFNSQKEPAVKRR

SEQ ID NO: 462 - protein, 190 aa, Glycine max
MRYLSLSTFSLLCITFVVMAASVDPLVVGRVIGDVVDMFIPSVNMSVYFGSKHVTNGCDIKPSIAISPPKLALTGNMDNLYTLVMTDPDAPSPSEPSMREWIHWILVDIPGGTNPFRGKEIVSYVGPRPPIGIHRYIFVLFQQKGPLGLVEQPPTRASFNTRYFARQLDLGLPVATVYFNSQKEPTVKRR

SEQ ID NO: 463 - protein, 200 aa, Glycine soja
MRYLSLSTFSLLCITFVVMAASVDPLVVGRVIGDVVDMFIPSVNMSVYFGSKHVTNGCDIKPSIAISPPTRPSIAISPPKLTLTGNMDNLYTLVMTDPDAPSPSEPSMREWIHWIVVDIPGGTNPFRGKEIVSYVGPRPPIGIHRYIFVLFQQKGPLGLVEQLPTRASFNTRYFARQLDLGLPVATVYFNSQKEPAVKRR

SEQ ID NO: 464 - protein, 172 aa, Gossypium raimondii
MAASVDPLVVGRVIGDVVDMFVPTVTMSVYYGSKHVSNGCDIKPSMAINPPKVAIDGLPDQFYTLVMTDPDAPSPSEPTMREWVHWIVSDIPGGTNPTRGKEILAYMGPRPPVGIHRYILVLFQQKGPLGAVQQPATRANFSTRFFADHLNLGLPVATVYFNAQKEPVSRRR

SEQ ID NO: 465 - protein, 225 aa, Herrania umbratica
MPYAWHKRHTNLSHFSPFTPLYKLLLAFLYSTLTPNQTNILISSPLLFALFFSMAVSVDPLVVGRVIGDVVDMFVPTVTMSVYYGSKHVTNGCDIKPSTTINPPKVSINGHSDKLYTLVMTDPDAPSPSEPSMREWVHWIVSDIPGGTNPTRGKEILVYMGPRPPVGIHRYILVLFQQKGPLGPVQQPASRANFSTRLFAQHLNLGLPVATVYFNAQKEPVSRRR

SEQ ID NO: 466 - protein, 172 aa, Hevea brasiliensis
MAASVDPLVVGRVIGDVIDMFVPSVNMSVYYGSKHVTNGCDIKPSIAVTPPKLSISGHPDQLYTLVMTDPDAPSPSEPSMREWVHWIVADIPGGTNPSKGKEILSYVGPRPPVGIHRYILVLFQQKMELGMAEQPQSRANFNTRMFAAHLDLGLPVATVYFNAQKEPASRRR

SEQ ID NO: 467 - protein, 172 aa, Jatropha curcas
MAASVDPLVVGRVIGDVIDLFVPSVTMSVYYGSKHVTNGCDVKPSTASNPPKLTISGHPNDLYTLVMTDPDAPSPSEPSMREWVHWVVADIPGGTNPTKGKEILSYVGPRPPVGIHRYILVLFRQKAAMGVVEQPQSRANFNTRLFAAHLELGLPVATVYFNAQKEPAAKRR

SEQ ID NO: 468 - protein, 201 aa, Juglans regia
MSHLPDTKKPSFFFSLCCCCLCFSVLPFLMSTSVDPLIVGRVIGDVVDMFVPTANMSVYFGPKHVTNGCDVKPSAATNPPKMTLSGNSDELYTLVMTDPDAPSPSEPSMREWVHWIVVDIPGGKNPTRGKEILPYVGPRPPIGIHRYILVLFRQRAPLGHVDQPTSRANFSTRIFAGQLDLGLPVATVYFNSQKEPANRRR

SEQ ID NO: 469 - protein, 189 aa, Lotus japonicus
MPSSKLSLLCIAFVVIIMAASVDPLVVGRVIGDVVDMFVPSVNMSVYFGSKHVTNGCDIKPSICISPPKVTLTGNMDNLYTLVMTDPDAPSPSEPSLREWIHWIVVDIPGGTNPNRGKEVLPYVGPRPPVGIHRFIFVLFKQKRPLGLVEQPPTRASFNTRYFAQQLELGLPVATVYFNSQKEPATKKR

SEQ ID NO: 470 - protein, 173 aa, Lupinus angustifolius
MATSVDPLIVGRVIGDVVDMFVPSVNMSVYFGTKHVTNGCDIKPSIALDPPRVTLTGNMDNLYTLVMTDPDAPSPSEPSHREWIHWIVTDIPGGTNPHRGKEILPYVGPRPPVGIHRYILVLFQQKGPLGLVEQPPSRASFNTRYFARQLNLGLPVATVYFNSQKEPASRRRT

SEQ ID NO: 471 - protein, 192 aa, Lupinus angustifolius
MPSLPPCNSIFLLTISFLIMATSVDPLIIGRVIGDVVDMFVPSVNMSVYFGTKHVTNGCHIKPSMAVDPPRITLTGNIDNLYTLVMTDPDAPSPSEPIHRELIHWIVTNIPGGTNPNQGNEILPYGGPRPPLGIHRYILVLFEQKGPLDLVEQPPSRASFNTRYFARQLNLGLPVATVYFNSQKEPAYRRRT

SEQ ID NO: 472 - protein, 172 aa, Malus domestica
MAASVDPLVVGRVIGDVVDMFVPTVSMSVYFGSKHVTNGCDIKPSMAINPPKITVSGHPGELYTLVMTDPDAPSPSEPSMREWVHWIVSDIPGGSNPLRGKEILPYVGPRPPVGIHRYILVLFQQKAPMGLVEQPPSRAHFNTRFFAAQLDLGLPVSTVYFNSQKEPANRRR

SEQ ID NO: 473 - protein, 192 aa, Malus domestica
MHCLAFLFFLVFAPNFLPDLMAASVDPLVVGRVIGDVVDMFVPTLSMSVYFGSKHVTNGCDIKPSMAINPPKITFTGHPGELYTLVMTDPDAPSPSEPSMREWVHWIVSDIPGGTNPLRGKEILPYVGPRPPVGIHRYILVLFQQKAPVGLVEQPPSRAHFNTRFFAAQLDLGLPVSTVYFNCQKEPANRRR

SEQ ID NO: 474 - protein, 172 aa, Manihot esculenta
MAASVDPLVVGRVIGDVIDMFIPSVNMSVYYGAKRVTNGCDVKPSLAVLPPQLTISGLPHDLYTLVMTDPDAPSPSEPTMREWVHWIVADIPGGTNPTKGKEILAYVSPRPPVGIHRYILVLFRQRKALGMMEQPQSRANFNTRMFAAHLELGLPVATVYFNAQKEPAARRR

SEQ ID NO: 475 - protein, 170 aa, Manihot esculenta
MAASVDPLVVGRVIGDVIDMFIPSVNMSVYYGAKRVTNGCDVKPSLAVLPPQLTISGLPHDLYTLVMTDPDAPSPSEPTMREWVHWIVADIPGGTNPTKEILAYVSPRPPVGIHRYILVLFRQRKALGMMEQPQSRANFNTRMFAAHLELGLPVATVYFNAQKEPAARRR

SEQ ID NO: 476 - protein, 173 aa, Medicago truncatula
MMAASVDPLVVGRVIGDVVDMFIPSVGMSVYFGPKHVTNGCDIKPSMAINPPKVTLTGNMDNLYTLVMTDPDAPSPSEPSMRELIHWIVVDIPGGTNPKRGKEILPYIGPKPPVGIHRYILVLFEQKGPIGMVEQPTSRVSFNTRYFASQMNLGLPVATVYFNSQKEPQAKRR

SEQ ID NO: 477 - protein, 172 aa, Medicago truncatula
MAASVDPLVVGRVIGDVVDMFIPSVGMSVYFGPKHVTNGCDIKPSMAINPPKVTLTGNMDNLYTLVMTDPDAPSPSEPSMRELIHWIVVDIPGGTNPKRGKEILPYIGPKPPVGIHRYILVLFEQKGPIGMVEQPTSRVSFNTRYFASQMNLGLPVATVYFNSQKEPQAKRR

SEQ ID NO: 478 - protein, 174 aa, Momordica charantia
MAMSVDPLVVGRVIGDVVDMFVPTANLAVYFNSKHVTNGCDIKPSLAVNPPRLVIPGHPRDLYTLVMTDPDAPSPSEPHMREWVHWIIVDIPGGSTMTQGKEILPYTGPRPPIGIHRYILLLFKQKGPVGLIEQPPSRANFSTRLFARHLDLDLPVAATYFNSQKEPATKKYAM

SEQ ID NO: 479 - protein, 172 aa, Morus notabilis
MAASVDPLVVGRVIGDVVDMFIPTLSVSVYFGSKHVTNGCDIKPSIAISPPKVAISGHSDELYTLVMTDPDAPSPSEPSMREWVHWIVVDIPGGTNPNRGKEILPYVGPRPPVGIHRFILVLFRQKAPLGLVDQPPTRANFNTRYFAGNLDLGLPVATVYFNSQKEPASKRR

SEQ ID NO: 480 - protein, 176 aa, Nelumbo nucifera
MIMAVSVEPLVVGRVIGDVVDMFVPTVSMSVYFGPKHVTNGCDIKPSMATNPPKVVVSGHTDDLYTLVMTDPDAPSPSEPSMREWVHWIVVDIPGGTSPSKGKEILPYMGPRPPVGIHRYILVLFRQRYSMKDAVIQQPATRANFNTRAFANQLDLGVPVATIYFNAQKEPANKKR

SEQ ID NO: 481 - protein, 222 aa, Nelumbo nucifera
MSTDRMPRYYEREISFSISCTVCQAHPPSSSRQLLSLSLFSLPTSMSVAAAVDPLVVGRVIGDVVDMFVPTVTMSAYFGTEHITNGCDIKPSMAVNPPKVVVSGRNDDLYTLVMTDPDAPSPSQPTMREWVHWIVVDIPGGTNPIRGKDIMPYVGPQPSVGIHRYILVLFSQKNPVKDSIQLQQPATRVNFNTREFAKQHDLGLPVATVYFNAQKELANEKP

SEQ ID NO: 482 - protein, 173 aa, Nicotiana attenuata
MAAKVDPLVVGRVIGDVVDMFVPSVTMSVHFGNKHVTNGCDIKPSIAADPPKITVGGHAADLYTLVMTDPDAPSPSEPNMREWVHWIVTDIPGCTNVARGNEVLGYVGPRPPVGIHRYILVLFRQKAPMPGILQPPLARSHFCTRAFAHQLDLGVPVATVYFNAHKEPANRKR

SEQ ID NO: 483 - protein, 173 aa, Nicotiana sylvestris
MAAKVDPLVVGRVIGDVVDMFVPSVTMSVHFGNKHVTNGCDIKPSIAADPPKITVGGHAADLYTLVMTDPDAPSPSEPNMREWVHWIVTDIPGCSNVARGKEVLGYVGPRPPVGIHRYILVLFRQKAPMPGILQPPLARSHFCTRAFAHQLDLGVPVATVYFNAHKEPANRKR

SEQ ID NO: 484 - protein, 173 aa, Nicotiana tomentosiformis
MAAKVDPLVVGRVIGDVVDMFVPSVTMSVHFGNKHVTNGCDIKPSIAADPPKITVGGHAADLYTLVMTDPDAPSPSEPNMREWVHWIVTDIPGCTNVARGKEVLGYMGPRPPVGIHRYIVVLFRQKGPMPGILQPPLARSHFCTRAFAHQLDLGVPVATVYFNAHKEPANRKR

SEQ ID NO: 485 - protein, 173 aa, Oxybasis rubra
MAASVDPLVVGRVIGDVVDMFVPSVSMSVYFGAKHVTNGCTIKPSIAVDPPRLIIGGHSDILYTLVMTDPDAPSPSEPSMREWVHWIVADIPGGASPSRGKEVIAYTGPIPPVGIHRFILVLFEQKQQLGISVEPPITRANFNTRLFAGRHGLGLPVATVYFNAQKEPANKKR

SEQ ID NO: 486 - protein, 172 aa, Parasponia andersonii
MAASVDPLVVGRVIGDVVDMFIPTVSVSVYFGSKHVTNGCDIKPSIAITPPKLTISGHSDELYTLVMTDPDAPSPSEPSMREWVHWIVVDIPGGTNPNRGKEILPYVGPRPPVGIHRYILVLFRQKSPLGLVDQPPCRANFNTRFFAAHLDLGLPVATVYFNSQKEPATKRR

SEQ ID NO: 487 - protein, 172 aa, Phaseolus vulgaris
MAASVDPLVVGRVIGDVVDMFVPSVNMSVYYGSKHVTSGCDIKPSIAVNPPKLTLTGKKENLYTLIMTDPDAPSPSEPNMREWIHWVVADIPGCTNPFRGKEIIPYTGPKPPVGIHRYIFVLFEQKAPMGPVEQPESRGNFSTRTFAKDMDLGLPVATVYFNSQKEPASRKR

SEQ ID NO: 488 - protein, 175 aa, Phoenix dactylifera
MASCVDPLVVGRVIGEVVDLFVPTVTMTVSYGLKHVNNGCHVKPSMAINPPMVQIAGRGSDLYTLVTIDPDAPSPSEPTMREWLHWVVVNIPGGTDPSQGEEVVPYMGPRPPVGIHRYVLVLFRQKSRFSMGMGLSLPASRANFNTRAFAAHHDLGLPVAAVYFNAQKEPANRRR

SEQ ID NO: 489 - protein, 173 aa, Populus euphratica
MAASVDPLVVGRVIGDVVDMFVPAVNMSVYYGSKHVSNGCDIKPSLSVDPPKVTISGHSDELYTLVMTDPDAPSPSEPRMREWVHWIVADIPGGTNPTRGKEILSYVGPRPPVGIHRYILVLFQQKMPLGSMMEPPQNRSHFNTRLYAAHLDLGLPVATVYFNAQKEPANKRR

SEQ ID NO: 490 - protein, 173 aa, Populus trichocarpa
MAASVDPLVVGRVIGDVVDMFVPAVKMSVYYGSKHVSNGCDIKPSLSVDPPKVTISGHSDELYTLVMTDPDAPSPSEPRMREWVHWIVADIPGGTNPTRGKEILSYVGPRPPVGIHRYILVLFQQKMPLGSMVEPPQNRSHFNTRLYAAHLDLGLPVATVYFNAQKEPANKRR

SEQ ID NO: 491 - protein, 172 aa, Prunus avium
MAASVDPLVVGRVIGDVVDMFVPTVNMSVYFGSKHVTNGCDIKPSMAINPPKITVSGQPGELYTLVMTDPDAPSPSEPSMREWVHWIVADIPAGTSPVRGKEILAYVGPRPPVGIHRYILVLFQQKGPMGLVEQPSSRAHFNTRFFSAQLDLGLPVSTVYFNSQKEPANRRR

SEQ ID NO: 492 - protein, 178 aa, Prunus mume
MAASVDPLVVGRVIGDVVDMFVPTVNMSVYFGSKHVTNGCDIKPSMAINPPKITVSGQPGELYTLVMTDPDAPSPSEPSMREWVHWIVADIPGGTSPVRGKIFTLYKKILAYVGPRPPVGIHRYILVLFQQKGPMGLVEQQSSRAHFNTRFFAAQLDLGLPVSTVYFNSQKEPANRRR

SEQ ID NO: 493 - protein, 172 aa, Prunus persica
MAASVDPLVVGRVIGDVVDMFVPTVNMSVYFGSKHVTNGCDIKPSMAINPPKITVSGQPGELYTLVMTDPDAPSPSEPSMREWVHWIVADIPGGTSPVRGKEILAYVGPRPPVGIHRYILVLFQQKGPMGLVEQPSSRAHFNTRFFAAQLDLGLPVSTVYFNSQKEPANRRR

SEQ ID NO: 494 - protein, 173 aa, Prunus persica
MAASVDPLVVGRVIGDVVDMFVPTVNMSVYFGSKHVTNGCDIKPSMAINPPKITVSGQPGELYTLQVMTDPDAPSPSEPSMREWVHWIVADIPGGTSPVRGKEILAYVGPRPPVGIHRYILVLFQQKGPMGLVEQPSSRAHFNTRFFAAQLDLGLPVSTVYFNSQKEPANRRR

SEQ ID NO: 495 - protein, 182 aa, Prunus yedoensis var. nudiflora
MAASVDPLVVGRVIGDVVDMFVPTVNMSVYFGSKHVTNGCDIKPSMAINPPRSQSVVSPASSTLWSLISLTLCVSVMTDPDAPSPSEPSMREWVHWIVADIPGGTSPVRGKEILAYVGPRPPVGIHRYILVLFQQKGPMGLVEQPSSRAHFNTRFFAAQLDLGLPVSTVYFNSQKEPANRRR

SEQ ID NO: 496 - protein, 172 aa, Punica granatum
MASSVDPLIVGRVIGDVVDMFVPTVNISVNYGSKHVNNGCDIKPSMSADTPKVTISGRPDQLYTLVMTDPDAPSPSEPSMREWVHWIVVDIPGGTNVSRGREILPYMGPRPPVGIHRYILVLFQQRAPLGLVDQPTSRANFNTRHFAAHFGLSLPVATVYFNSQKEPANRRR

SEQ ID NO: 497 - protein, 172 aa, Pyrus x bretschneideri
MAASVDPLVVGRVIGDVVDMFVPTVSMSVYFGSKHVANGCDIKPSMAINPPKITVSGHPGELYTLVMTDPDAPSPSEPSMREWVHWIVSDIPGGTNPLRGKEILPYVGPRPPVGIHRYILVLFQQKAPMGLVEQPPSRAHFNTRFFAAQLDLGLPVSTVYFNSQKEPANRRR

SEQ ID NO: 498 - protein, 179 aa, Pyrus x bretschneideri
MHCLAFLFFLVFAPNFLPDLMAASVDPLVVGRVIGDVVDMFVPTLSMSVYFGSKHVTNGCDIKPSMAINPPKITFTGHPGELYTLVMTDPDAPSPSEPSMREWVHWIVSDIPGGTNPLRVGIHRYILVLFQQKAPVGLVEQPPSRAHFNTRFFAAQLDLGLPVSTVYFNCQKEPANRRR

SEQ ID NO: 499 - protein, 172 aa, Quercus suber
MAASVDPLVVGRVIGDVVDMFVPTVNMAAYFGSKHVTNGCDIKPSIAVNPPKVTLTGHSDELYALVMTDPDAPSPSEPNMREWVHWIVLDIPGGTNPSRGKEILPYVGPRPPIGIHRYILVLFRQKCPLGLVDQPPSRANFNTRFFAAQLDLGLPVATVYFNSQKEPASKRR

SEQ ID NO: 500 - protein, 173 aa, Raphanus sativus
MAASVDPLVVGRVIGDVLDMFIPTANMSVYFGPKHITNGCEIKPSAAVNPPRVIISGNSNELYTLVMTDPDAPSPSEPNMREWVHWIVVDIPGGTNPSKGKEILQYMEPRPPVGIHRYIFVLFRQNSPVGMMVQQPPSRANFSTRMFAGHLDLGLPVATVYFNAQKEPASRRR

SEQ ID NO: 501 - protein, 193 aa, Rosa chinensis
MLDQLLLALHFLHSVFVFSDTMAASVDPLVVGRVIGDVVDMFVPTVNMSVYFGSKHVTNGCDIKPSIAVSPPKVTFSGHPGELYTLVMTDPDAPSPSEPSMREWVHWIMADIPGGTNPIRGKEILPYVGPRPPVGIHRYILVLFQQKVPMGLVDQPPTRAHFNTRYFAAQLDLGLPVSTVYFNSQKEPANRRR

SEQ ID NO: 502 - protein, 172 aa, Rosa chinensis
MAASVDPLVVGRVIGDVVDMFVPTVNMSVYFGSKHVTNGCDIKPSIAVSPPKVTFSGHPGELYTLVMTDPDAPSPSEPSMREWVHWIMADIPGGTNPIRGKEILPYVGPRPPVGIHRYILVLFQQKVPMGLVDQPPTRAHFNTRYFAAQLDLGLPVSTVYFNSQKEPANRRR

SEQ ID NO: 503 - protein, 174 aa, Sciadopitys verticillata
MARSTDPLVVGRVVGDVIDLFVPSVDMAVYYGAKQVTNGCEIKPSTTVNRPNVQIAGRYYEDSLYTLVMTDPDAPSPSEPNLREWIHWLVTDIPGATDPSQGREVLPYMGPRPPIGIHRYVFVLFKQAGPMVMVVPPQQRNNFSTRAFAAHYGLGLPVATVYFNAQKEPGTRKR

SEQ ID NO: 504 - protein, 174 aa, Sesamum indicum
MAANVDPLVVGRVIGDVVDMFVPTVSMSVYYGSKHVNNGCDIKPSMAAAPPRVTITGHANELYTLVMTDPDAPSPSEPSMREWVHWIVTDIPGRSNVTRGREVLPYIGPRPPVGIHRYILVLFRQNASVEGVEAPVSRTHFNTRAFAQELDLGMPVATVYFNAHKEPANRKRQY

SEQ ID NO: 505 - protein, 173 aa, Solanum pennellii
MGGKVDPLVVGRVIGDVVDMFVPSVTMSVHYANKHVTNGCDIKPSIATEPPKITIGGQPDEFYTLVMTDPDAPSPSEPTMREWVHWIVTDIPGCSNVARGKEVLGYVGPRPPVGIHRYILVLFRQTAPMQEIFQAPVARAHFCTRMFAHQLDLGVPVATVYFNAHKEPANRKR

SEQ ID NO: 506 - protein, 173 aa, Solanum tuberosum
MGGKVDPLVVGRVIGDVVDMFVPSVTMSVHYANKHVTNGCDIKPSIAIEPPKITIGGHPDEFYTLVMTDPDAPSPSEPTMREWVHWIVTDIPGCSNVARGKEVLGYVGPRPPVGIHRYILVLFRQNAPMQGILQPPVARAHFCTRVFAHQLDLGTPVATVYFNAHKEPANRKR

SEQ ID NO: 507 - protein, 172 aa, Tarenaya hassleriana
MAASVDPLVVGRVIGDVVDMFVPTANMSVYYGPKHITNGCEIKPSLAASPPKLTISGLSHDLYTLVMTDPDAPSPSEPSLREWVHWIVVDIPGGTNPTRGIEILPYMEPRPTVGIHRYITVLFRQKTAVGGMQQPPSRANFSTRMFASHLGLGLPVATVYFNAQKEPASRRR

SEQ ID NO: 508 - protein, 172 aa, Theobroma cacao
MAVSVDPLVVGRVIGDVVDMFVPTVTMSVYYGSRHVTNGCDIKPSTTINPPKVSINGHSDELYTLVMTDPDAPSPSEPSMREWVHWIVSDIPGGTNPTRGKEILVYMGPRPPVGIHRYILVLFQQKGPLGQVQQPASRANFSTRLFAQHLNLGLPVATVYFNAQKEPVSRRR

SEQ ID NO: 509 - protein, 225 aa, Theobroma cacao
MPYAWHIRHTNLSHFSPFTPLYKLLLAFLYSTLTPNQTNILISSPLLFALFFSMAVSVDPLVVGRVIGDVVDMFVPTVTMSVYYGSRHVTNGCDIKPSTTINPPKVSINGHSDELYTLVMTDPDAPSPSEPSMREWVHWIVSDIPGGTNPTRGKEILVYMGPRPPVGIHRYILVLFQQKGPLGQVQQPASRANFSTRLFAQHLNLGQPVATVYFNAQKEPVSRRR

SEQ ID NO: 510 - protein, 159 aa, Theobroma cacao
MAVSVDPLVVGRVIGDVVDMFVPTVTMSVYYGSRHVTNGCDIKPSTTINPPKVMTDPDAPSPSEPSMREWVHWIVSDIPGGTNPTRGKEILVYMGPRPPVGIHRYILVLFQQKGPLGQVQQPASRANFSTRLFAQHLNLGQPVATVYFNAQKEPVSRRR

SEQ ID NO: 511 - protein, 172 aa, Trema orientale
MAASVDPLVVGRVIGDVVDMFVPTVSVSVYFGSKHVTNGCDIKPSIAITPPKLTISGHSDELYTLVMTDPDAPSPSEPSMREWVHWIVVDIPGGTNPNRGKEILPYVGPRPPVGIHRYILVLFRQKSPLGLVDQPPCRANFNTRFFAAHLDLGLPVATVYFNSQKEPATKRR

SEQ ID NO: 512 - protein, 173 aa, Trifolium pratense
MLATSVDPLVVGRVIGDVVDMFIPSVGMSVYFGPKHVTNGCDIKPSMAINPPKITLTGKMDNLYTLVMTDPDAPSPSEPSMRELLHWIVVDIPGGTNPKRGKEILPYIGPKPPIGIHRYIMVLFEQKGPIGMMEQPTTRVSFNTRYFASQLDLGLPVATVYFNSQKEPRSKRR

SEQ ID NO: 513 - protein, 172 aa, Vigna angularis
MAVSVDPLVVGRVIGDVVDMFVPSVNMSVYYGAKHVTNGCDIKPSVSVNPPKLTLTGKKESLYTLIMTDPDAPSPSEPSMREWVHWIVVDIPGGTNPFRGKEILAYTGPKPPVGIHRYIFVLFEQKGPMGPVEQPESRGNFNTRNFAKDLDLGLPVATTYFNAQKEPASRKR

SEQ ID NO: 514 - protein, 173 aa, Vigna radiata var. radiata
MAVSVDPLVVGRVIGDVVDMFVPSVNMSVYYGPKHVTNGCDIKPSVAVNPPKLTLTGKKESLYTLIMTDPDAPSPSEPTMREWVHWVVVDIPGGTNPFRGKEILAYTGPKPPVGIHRYIFVLFEQKGPMGPVEQPESRGNFNTRNFAKDLDLGLPVATTYFNAQKEPASRRRT

SEQ ID NO: 515 - protein, 172 aa, Vitis vinifera
MAASVDPLVVGRVIGDVVDMFVPTINMSVYYGAKHVTNGCDVKPSLTVNPPKVTLSGHPDEFYTLVMTDPDAPSPSEPSMREWVHWIVADIPGGTNATRGKEALPYVGPRPPVGIHRYILVLFQQKAPLGLVEQPGSRAHFSTRAFANQLDLGLPVATVYFNAQKEPANRRR

SEQ ID NO: 516 - protein, 172 aa, Vitis vinifera
  misc_feature (145)..(145): Xaa can be any naturally occurring amino acid
MAASVDPLVVGRVIGDVVDMFVPTINMSVYYGAKHVTNGCDVKPSLTVNPPKVTLSGHPDEFYTLVMTDPDAPSPSEPSMREWVHWIVADIPGGTNATRGKEALPYVGPRPPVGIHRYILVLFQQKAPLGLVEQPGSRAHFSTRXFANQLDLGLPVATVYFNAQKEPANRRR

SEQ ID NO: 517 - protein, 172 aa, Ziziphus jujuba
MAASVDPLVVGRVIGDVVDMFIPRVTMSVYFGPKHVTNGCDIKPSIAINPPKITISGHADELYTLVLTDPDAPSPSEPSMREWVHWIVVDIPGGTNPFRGTEILPYIGPKPPVGIHRYILVLFQQKNPVGAVEQPASRANFNTRLFSSQLDLGLPVATVYFNSQKEPASKKR

SEQ ID NO: 518 - protein, 173 aa, Aegilops tauschii subsp. tauschii
MANDSLTRAQIVGDVLDPFVSSVPLTVMYDGRPVFNGMEFRSPAVSLKPNVEIGGDDFRVAYTLVMVDPDAPNPSNPTLREYLHWMVTDIPSSTNDSFGKEVVPYESPSPTMGIHRMVLVLYQQLGRGTVFAPQARQSFNSRSFARRFNLGKPVAAVYFNCQRPTGTGGRRFT

SEQ ID NO: 519 - protein, 180 aa, Aegilops tauschii subsp. tauschii
MAAHVDPLVVGRVIGDVVDMFVPTMPVTVRFGTKDLTNGCEIKPSIADAAPSIQIAGRAGDLFTLVMTDPDAPSPSEPTMKEWLHWLVVNIPGGSDPSQGEEVVPYMGPKPPLGIHRYVLVLFQQKARVLAPAPGGDTAASAMRARFSTRAFAERHDLGLPVAAMYFNAQKEPANRRRRY

SEQ ID NO: 520 - protein, 177 aa, Agapanthus praecox subsp. orientalis
MHMASCVDPLVVGRVIGEVVDLFVPTLTMSVSYGSKHINNGCDVKPSIAAEPPTVNLGGRMSELYTLVMIDPDAPSPSDPTMREWVHWVVVNIPGGTDPSQGQEVVPYMGPRPPLGIHRYVLVLFRQKAGLPGITPPESRANFNTRYFAARYDLGLPVATVYFNAQKEPASRRRRHI

SEQ ID NO: 521 - protein, 175 aa, Amborella trichopoda
MARSVEPLAVGKVIGDVIDMFVPTVDVSVSYVSKQVANGCELKPSGTAERPRFQLSARSLDDNLYTLVMTDPDAPSPSEPTMREWLHWIVVDIPGGSDAMRGREIVSYMGPKPPTGIHRYVFSLFKQQGPLGSVARAPEARNNFSTRAFAARLGLGLPVAAVYFNAQKEPASRKR

SEQ ID NO: 522 - protein, 225 aa, Amborella trichopoda
MAALFPLPLKHEKSHPAITLPLSCFSGETILPNLTLAPRFISKETFLSPSMARSVEPLAVGKVIGDVIDMFVPTVDVSVSYVSKQVANGCELKPSGTAERPRFQLSARSLDDNLYTLVMTDPDAPSPSEPTMREWLHWIVVDIPGGSDAMRGREIVSYMGPKPPTGIHRYVFSLFKQQGPLGSVARAPEARNNFSTRAFAARLGLGLPVAAVYFNAQKEPASRKR

SEQ ID NO: 523 - protein, 174 aa, Amentotaxus argotaenia
MARSTDPLVVGRVIGDVIDLFVPSVDMAVHYGTKQVTNGCEIKPSVTVNHPNVQIAGRFYDNSLYTLVMTDPDAPSPSEPNLREWIHWLVTDIPAATDPSQGREVLAYMGPRPPIGIHRYVFALFKQQGPMVMVMPPQQRNNFSTRAFAAHYGLGIPVAAVYFNAQKEPGTRKR

SEQ ID NO: 524 - protein, 176 aa, Apostasia shenzhenica
MTTAARMVEPLVLGRVIGDVLDAFMPSVKLEVFYPTNKLVSNGHELLPSMVSAKPQAVIGGDDMRAAYTLIMTDPDAPSPSDPHLREHLHWLVTDIPGTTNISFGKEVISYEAPKPHIGIHRYVFVLFMQRGRQSVRPPEARDSFSTRKFAGDNDLGLPVAAVYFNAQRETACRKR

SEQ ID NO: 525 - protein, 248 aa, Aquilegia coerulea
MNLSKPFSSSKATVTLLFFYLFIFSSALDMSIISYDTESHVFGGKKSEGAVVAVKDQGVCGCRCGNFSGNLMANSIEPRCVDPLVVGKVIGDVVDMFIPTINMSVYYGSKHVTNGCDIKPSLATAPPTVHISGFSDELYTLVMSDPDAPSPSEPTKREWLHWIVVNIPGAGYVTRGKEVLPYMGPAPPVGIHRYALLLFRQKNPLSIDNPPEVRANFKTRNFAHQFDLGLPVACAYFNAQKEPMNKRR

SEQ ID NO: 526 - protein, 166 aa, Aquilegia formosa
MAASVDPLVVGKVIGDVVDMFIPTINMSVYYGSKHVTNGCDIKPSLATAPPTVHISGFSDELYTLVMSDPDAPSPSEPTKREWLHWIVVNIPGAGYVTRGKEVLPYMGPAPPVGIHRYALLLFRQKNPLSIDNPPLRANFKTRNFAHQFDLGLPVACAYFNAQKEL

SEQ ID NO: 527 - protein, 173 aa, Arabidopsis lyrata subsp. lyrata
MAASVDPLVVGRVIGDVLDMFIPTANMSVYFGPKHITNGCEIKPSTAINPPKVNISGHSDELYTLVMTDPDAPSPSEPNMREWVHWIVVDIPGGTSPSRGKEILPYMEPRPPVGIHRYILVLFRQNSPVGLMVQQPPSRANFSTRMFAGHFDLGLPVATVYFNAQKEPASRRR

SEQ ID NO: 528 - protein, 173 aa, Arabis alpina
MAASVDPLVVGRVIGDVLDMFIPTANMSVYFGPKHITNGCEIKPSAALNPPKVIISGHPDELYTLVMTDPDAPSPSEPNMREWIHWIVVDIPGGTNPSRGKEILPYMEPRPPVGIHRYILVLFRQNSPVGLMVQQPPSRANFSTRMFAGHFDLGLPVATVYFNAQKEPASRRR

SEQ ID NO: 529 - protein, 178 aa, Arachis duranensis
MGRSTGALSVGKVIGEVVDPFTPTAEITVIYGSKQVANGCEIKPSLAADKPHVQILGSSNNAAHLYTLVMVDPDAPSPSEPSYREWLHWMVVDIPNGSDVTQGKELVTYTGPCPPVGIHRYVFAVFNQSNEGPTTQIGPPNGRPNFNTRQFASQHYLGPPVAAIYFNSQKEPKTRKRQ

SEQ ID NO: 530 - protein, 178 aa, Arachis hypogaea
MGRSTGALSVGKVIGEVVDPFAPTAEITVIYGSKQVANGCEIKPSLAADKPYVRILGPSNNAAHLYTLVMVDPDAPSPSEPSYREWLHWMVVDIPNGSDVTQGKELVTYTGPCPPVGIHRYVFAAFNQSNEGPTTQIGPPNGRPNFNTRQFASQHYLGPPVAAIYFNSQKEPKTRKRQ

SEQ ID NO: 531 - protein, 178 aa, Arachis ipaensis
MGRSTGALSVGKVIGEVVDPFTPIAEITVIYDSKQVANGCQIKPSLTADKPYVRILGPSNNAAHLYTLVMVDPDAPSPSEPTYREWLHWMVVDIPNGSDVTQGKELVTYTGPCPPVGIHRYVFAAFNQSNEGPTTQIGPPNGRPNFNTRQFASQHYLGPPVAAIYFNSQKEPKTRKRQ

SEQ ID NO: 532 - protein, 178 aa, Brachypodium distachyon
MSRGRDPLALSQVIGDVLDPFVKSAAMRINYGEKEITNGTGLRSSSVLNAPQVEIEGRDRTKLYTLVMVDPDAPSPSKPEYREYLHWLVTDIPEATDARFGNEIVPYEAPRPPAGIHRIVFVLFKQEARQTVYAPGWRPNFNIRDFSAFYNLGPPVAALFFNCQKESGVGGRRFQGPG

SEQ ID NO: 533 - protein, 179 aa, Brachypodium distachyon
MAVRLDPLELGKVIGEVVDRFVPTMVLSVRFGTKVLTNGCEIKPSVAVAAPAVQIGGGVGDLFTLVMIDPDAPSPSEPSMREWLHWLVVNIPGGADPSQGILLVVPYMSPRPALGIHRYVLVVFQQRAPAPAVAPGEEAPGVRAGFRTREFAKEHGLGLPVAAMYFNAQKEPASRRRRY

SEQ ID NO: 534 - protein, 174 aa, Cephalotaxus sinensis
MARSTDPLVVGRVIGDVIDLFVPSVDMAVYYGTKQVTNGCEIKPSLTVNRPNVQIAGRFYDNSLYTLVMTDPDAPSPSEPNLREWIHWLVTDIPGATDPSQGRELLAYMGPRPPIGIHRYVYALFKQQGPMVMVMPPQQRNNFSTRAFAAHYGLGLPVAAVYFNAQKEPGTRKR

SEQ ID NO: 535 - protein, 179 aa, Chenopodium quinoa
MAEAPEILVAGKVIGDVLEPFTPEAELTVQYGSETVSNGCEIKPLEAKNRPRLQVTSHNPRLDDLYTLIMVDPDAPNPTHPTLREWLHWIVVDIPQGMDASKGRTLVEYMGPQPSTGKHRYVFALYKQKGPLVKPRPLPPEYARGNFNTRHFAAHNDLGQPVAALFFNSRKEANIAYDN

SEQ ID NO: 536 - protein, 176 aa, Citrus clementina
MARSMEPLVVGRVIGDVVDMFTPATEMTVHYGTKQVANGCEIKPSASADKPSVQIHAPAPASSNLYTLVMVDPDAPSPSEPRYREWLHWIVVDIPEGSDATKGKELVAYMGPQPPTGIHRYVFVLFNQKGKVMAGCRPPDARSNFSTRRFAADNGLQPPVAAVYFNSQKEVAVRKR

SEQ ID NO: 537 - protein, 176 aa, Citrus sinensis
MARSMEPLVVGRVIGDVVDMFTPATEMTVHYGTKQVANGCEIKPSASADKPSVQIHAPPPASSNLYTLVMVDPDAPSPSEPRYREWLHWIVVDIPEGSDATKGKELVAYMGPQPPTGIHRYVFALFNQKGKVMAGCRPPDARSNFSTRRFAADNGLQPPVAAVYFNSQKEVAVRKR

SEQ ID NO: 538 - protein, 177 aa, Coffea canephora
MARPVEPLVVGRVIGDVLDMFVPAAELIVQYGSKQVGNGCEIKPSHSAHKPAVRVNGSRDRAASLFTLVMVDPDAPSPSDPTFREWLHWIVVNIPEGGDASEGKELVAYQGPQPPAGIHRYVFALFKQRGRMEKPKTLPEPRHNFTTRQFASHNELGLPVAAVYFNSQKEPAGNRKR

SEQ ID NO: 539 - protein, 174 aa, Cucumis sativus
MVRSVDSLVVGRVIGDVLDMFTPAADVSVSYGSKHVANGGEIKPFVAADRPTVLIQAPVSNQLYTLVMVDPDAPSPSEPTFREWLHWIVVDIPEGADANKGKEVVHYMGPQPPTGIHRYVFAVFKQNTPLGGRLRPPTTRSNFKTRQFASQNGLGLPVAAVYFNSQKQPASKKR

SEQ ID NO: 540 - protein, 177 aa, Cucurbita maxima
MAAYVDPLVVERVIGDVVDMFVPSATMSVYYHSKHVTNGCNIRPSLTDDPPRILMSSLNLSDLYTLVMVDPDAPSPSEPYMREWVHWIVVDIPGTGNVNLGREILAYTGPCPPIGIHRYILLLFKQKGPIGMIEQPATRANFNTRHFATHLELGLPIAATYFNAQKEPAAKKVATAA

SEQ ID NO: 541 - protein, 175 aa, Cucurbita maxima
MVRSLEPLVVGRVIGDVLDMFTPAADLSVTYASKQVANGCEIKPSAAADAPTVVIQGPISNNDLYALVMVDPDAPSPSEPTFREWLHWIVVDIPEGSDANKGKEVVQYMGPQPPTGIHRYVLAVFKQNRAIGGSLRPPNTRSNFSTQQFASQNALGLPVAAVYFNSQKQPAAKKR

SEQ ID NO: 542 - protein, 177 aa, Cucurbita moschata
MAASVDPLVVERVIGDVVDMFVPSATMSVYYNSKHVTNGCNLRPSLTDDPPRILMSSLNLSDFYTLVMVDPDAPSPSEPYMREWVHWIVVDIPGTGNVSLGREILSYTGPCPPIGIHRYILLLFKQKGPIGMIEQPATRANFNTRHFATHLELGLPIAATYFNAQKEPAAKKVATAA

SEQ ID NO: 543 - protein, 177 aa, Cucurbita moschata
MAASVDPLVVERVIGDVVDMFVPSATMSVYYNSKHVTNGCNLRPSLTDDPPRILMSSLNLSDFYTLVMVDPDAPSPSEPYMREWVHWIVVDIPGTGNVNLGREILSYTGPCPPIGIHRYILLLFKQKGPIGMIEQPATRANFNTRHFATHLELGLPIAATYFNAQKEPAAKKVATAA

SEQ ID NO: 544 - protein, 175 aa, Cucurbita moschata
MVRSLEPLVVGRVIGDVLDMFTPAADLSVTYASKQVANGCEIKPSAAADAPTVVIQGPISNNDLYALVMVDPDAPSPSEPTFREWLHWIVVDIPEGSDANKGKEVVQYMGPQPPTGIHRYVLAVFKQNRAIGGSLRPPNTRSNFSTRQFASQNALGLPVAAVYFNSQKQPATKKR

SEQ ID NO: 545 - protein, 177 aa, Cucurbita pepo subsp. pepo
MASYVDPLVVERVIGDVVDMFVPSATMSVYYNSKHVTNGCNLRPSLTDDPPRILMSSLNLSDFYTLVMVDPDAPSPSEPYMREWVHWIVVDIPGTGNVSSGREILSYTGPCPPIGIHRYILLLFKQKGPIGMIEQPATRANFNTRHFATHLELGLPIAATYFNAQKEPAAKKVASAA

SEQ ID NO: 546 - protein, 175 aa, Cucurbita pepo subsp. pepo
MVRSLEPLVVGRVIGDVLDMFTPAADLSVTYASKQVANGCEIKPSAAADAPTVDIQGPISNNDLYALVMVDPDAPSPSEPTFREWLHWIVVDIPEGSDANKGKEVVQYMGPQPPTGIHRYVLAVFKQNRAIGGSLRPPNTRSNFSTRQFASQNALGLPVAAVYFNSQKQPAAKKR

SEQ ID NO: 547 - protein, 173 aa, Cycas revoluta
MARSIDPLVVGRVVGEVIDMFVPSVEAAVYYGSKQVTNGCEIKPSATVQRPTVQIRRTYDKTLYTLVMTDPDAPSPSEPSMREYVHWVVTDIPGGTDACQGKEVLPYVGPRPPIGIHRYVFVLFKQRGPMIMTTPPQPRNNFSTRAFAAHHGLGLPVAAVYFNAQKEPGARKR

SEQ ID NO: 548 - protein, 181 aa, Cycas revoluta
MARSVDPLVVGKVIGDVIDMFVPSVHMSVYYGAKQVTNGCEIKPSTAVERPNVHVATGRHFDDTLFTLVMTDPDAPSPSDPNMREWIHWIVTDIPGATDVSQGREVLTYTGPRPPIGIHRYVFVLFRQQRPMLMMMAPQVRQNFSTRAFAADYGLGLPVAAVNFNAQKEPANKKRLSASSV

SEQ ID NO: 549 - protein, 173 aa, Dendrobium catenatum
MASTFVESLVVGRVIGEVVDLFVPTVTMSVNYGAKHINNGCHVKPSMAVNPPALCISGNISDLYTLIMTDPDAPSPSEPRMREWIHWLVVNIPGGTDPFKGEEIVPYMPPQPPLGIHRYVFVLFQQEKRIEGMSPLASRANFNTRLFASQLELGLPVAAVYFNCQREPNNRRR

SEQ ID NO: 550 - protein, 176 aa, Dimocarpus longan
MARSLDPLVVGRVIGDVVDMFNLVTEFTVRYGNKHVANGCDIKPSASASKPRVQILAPPLSSNLYTLVMVDPDAPSPSEPKYREWLHWIVVDIPEGSDATQGKELVPYRGPQPPTGIHRYVFVLFKQKNGAVMAGTRPPDARNNFRTRLFAAENDLGLPVAAVYFNSQKEISVRKR

SEQ ID NO: 551 - protein, 175 aa, Elaeis guineensis
MASYVDPLVVGRVIGEVVDLFVPTMSMSVSYGTKHVNNGCDVKPSMAINPPTVQIAGRRADLYTLVMTDPDAPSPSDPTMREWLHWVVVNIPGGTDTSHGEEVVAYMGPRPPVGIHRYALVLFQQKSRFSTGAGVALPASRANFNTRTFAARHDLGLPVAAVYFNAQKEPANRRR

SEQ ID NO: 552 - protein, 168 aa, Erythranthe guttata
MPRAALDPLVVGKVIGDVLDMFVPAAELAVHYGGEEIGNGSEVKPSSAAQRPKVQIKGAISPSYYTLVMVDPDAPSPGEPTLREWLHWLVIDIPEGSDATEGKEIMEYMGPKPPAGVHRYVFAVFQQHGLMETVKRKPVERQLFDTRQFARENDLGLPAAALYFKSHK

SEQ ID NO: 553 - protein, 177 aa, Ficus carica
MARSLEPLVVGKVIGDVVDMFSPAVEFTVRYGAKQVSNGCEIKPSATADHPKAQILGPPNPSNLYTLVMVDPDAPSPSEPTLREWLHWIVVDIPEGLDATKGKEVVAYMGPKPPTGIHRYVLVLFRQRNGTRLAGSVPSPEVRSNFSTRRFAAQYDLGLPVAAVYFNSQKEPATRKR

SEQ ID NO: 554 - protein, 172 aa, Fragaria x ananassa; identical to SEQ ID NO: 459

SEQ ID NO: 555 - protein, 174 aa, Ginkgo biloba
MARSVDPLIVGKVIGDVIDIFTPSVDAAVYYGTKRVTNGCEIKPSATLQRPNVQVSARNFEDTLFTLVMTDPDAPSPSEPNMREWVHWIVTDIPVGTDASQGREILPYMGPRPPIGIHRYAFVLFRQQNPMLMMLAPQARHNFSTRAFAARYGLGLPVATVYFNAQKEPANKKR

SEQ ID NO: 556 - protein, 174 aa, Ginkgo biloba
MARSVDPLVVGRVIGDVIDMFTPSVDMAVFYGAKQVTNGCEIKPSATVQRPNVQVAGRHYDDTLYTLVMTDPDAPSPSEPNMREWIHWMVTDIPGATDATQGKEILPYMGPRPPIGIHRYIFVLFKQRGPMVMAMPPQQRNNFSIRTFAAQYGLGLPVAAAYFNAQKEPGTRKR

SEQ ID NO: 557 - protein, 175 aa, Gossypium arboreum
MARSVEPLVVGRVIGDVLDMFTPASEFTVRYGTKQVTNGCDIKPSAAADKPHVQILGHPFSSNLYTLVMVDPDAPSPSEPRLREWLHWIVVDIPEGQDATKGRELVAYMGPQPPTGIHRYILALFKQEGAMEGRIQVADARANFSTRRFAAQNRLGLPVAAVYFNSQKEPAAKKR

SEQ ID NO: 558 - protein, 175 aa, Gossypium barbadense
MARSVEPLVVGRVIGDVLDMFTPASEFTVRYGTKQVTNGCDIKPSAAADKPHVQILGHPFSSNLYTLVMVDPDAPSPSEPRLREWLHWIVVDIPEGQDATKGRELVAYMGPQPPTGIHRYILALFKQEGAMEGRIQVAGARANFSTRRFAAQNRLGLPVAAVYFNSQKEPAAKKR

SEQ ID NO: 559 - protein, 175 aa, Gossypium hirsutum
MARSVEPLVVGRVIGDVLDMFTPASEFTVRYGTKQVTNGCDIKPSAAADKPHVQILGHPFSSNLYTLVMVDPDAPSPSEPRLREWLHWIVVDVPEGQDATKGRELVAYMGPQPPTGIHRYILALFKQEGAMEGRIQVADARANFSTRRFAAQNRLGIPVAAVYFNSQKEPAAKKR

SEQ ID NO: 560 - protein, 175 aa, Gossypium hirsutum
MARSVEPLVVGRVIGDVLDMFTPASEFTVRYGTKQVTNGCDIKPSAAADKPHVQILGHPFSSNLYTLVMVDPDAPSPSEPRLREWLHWIVVDIPEGQDSTKGRELVAYMGPQPPTGIHRYILALFKQEGAMEGRIQVADARANFSTRRFAAQNRLGLPVAAVYFNSQKEPAAKKR

SEQ ID NO: 561 - protein, 175 aa, Gossypium raimondii
MARSVEPLVVGRVIGDVLDMFTPASEFIVRYGTKQVTNGCDIKPSAAADKPHVQILGHPFSSNLYTLVMVDPDAPSPSEPRLREWLHWIVVDVPEGQDATKGRELVAYMGPQPPTGIHRYILALFKQEGAMEGRIQVADARANFSTRRFAAQSRLGLPVAAVYFNSQKEPAAKKR

SEQ ID NO: 562 - protein, 174 aa, Handroanthus impetiginosus
MAANVDPLVVGRVIGDVVDMFVPTVSMSVYYGSKHVNNGCDIKPSIAACPPRVTITGHSDEFYTLVMTDPDAPSPSEPTMREWVHWIVTEIPGCSNVTRGKEVLSYAGPQPPIGIHRYILVLFRQKGILNGLEPPVSRSHFNTRAFAQELDLGMPVATVYFNAHKEPTNRKRHH

SEQ ID NO: 563 - protein, 175 aa, Herrania umbratica
MARSVEPLVVGRVIGDVLDMFTPAAELTVHYGAKQVHNGCDIKPSSAADKPHVRILGPLVSSSLYTLVMVDPDAPSPSEPRLREWLHWIVVDIPEGHEATEGREMVPYMGPQPPTGIHRYVLVLFKQERATEGGCQLPDGRANFSTRQFAAQNSLGLPVAAVYFNSQKEPAVKKR

SEQ ID NO: 564 - protein, 175 aa, Hevea brasiliensis
MARSLEPLVVGKVIGDVLDMYNPVAEFTVRYGSKQIANGWEIKPSVAAEMPHVQIMGSRFSSDLYTMVMVDPDAPSPSEPKWREWLHWIVVDIPEGSDATKGHELVPYMGPQPPTGIHRYVFALFKQKAALMGRSRPPGGRGNFSTRQFAAQHGFGLPVAAVYFNSQKEPAVKKR

SEQ ID NO: 565 - protein, 180 aa, Ipomoea nil
MANANPRSVDPLVVGKVIGDVLDMFVPVVEFTVDYGSKKIANGVEITPSSAAQKPSVHINGSPASPNLYTLIMVDPDAPSPSEPTFREWLHWVVTDIPEGSDASKGREVAEYIGPSPPTGIHRYVFALFRQREAMQVAQKPPESRGNFRTRQFAAANGLGLPVAALYFNSQKQSATNKKR

SEQ ID NO: 566 - protein, 175 aa, Jatropha curcas
MARSLEPLVVGKVIGEVLDMYNPVAEFTVHYGSKQVANGCEIKPSVAAQKPHVHILGSRLSSDLYTLVMVDPDAPSPSEPKWREWLLWIVVDIPEGSDATKGHELVSYMGPQPPTGIHRYVFALFKQKGALMGRIQPPDGRGNFNTRHFAAQSGLGLPVAAVYFNSQKEPAVKKR

SEQ ID NO: 567 - protein, 176 aa, Juglans regia
MARSIEPLVVGKVIGDVVDMFTPAANFTVHYGSKQVANGCEIKPSAAADMPSVQILAPRPVSTNLYTLVMVDPDAPSPSEPTMREWLHWIVVDIPEGSDATKGKEFVPYMGPRPPIGIHRYAFVLFKQKSEMMVGCRPPNARANFSARQFAAQYELGLPVAAVYFNSQKEPASRKR

SEQ ID NO: 568 - protein, 173 aa, Lolium perenne
MSRGRDPLALSQVIGDVLDPFVKSAAMRINYGEKEITNGTGLRASSVLNAPQVEIEGRDRTKLYTLVMVDPDAPSPSKPEYREYLHWLVTDIPEATDARFGNEIVPYEAPRPPAGIHRLVFVLFKQEARQTVYAPGWRPNFNIRDFSAFYNLGPPVAALFFNCQKESGVGGRR

SEQ ID NO: 569 - protein, 178 aa, Lolium perenne
MAAHVDPLVVGRVIGDVVDMFVPTMPLSVRFGTKDLTNGCEIKPSLAAAAPMVQIAGRLGDLFTLVMTDPDAPSPSEPTMKEWLHWLVVNIPGGSDPSQGQEVVPYMAPQPPLGIHRYVLVLYQQKARVAAPAQGPGPDAEMRARFSTRAFAGRHDLGLPVAAMYFNAQREPASRRRR

SEQ ID NO: 570 - protein, 175 aa, Manihot esculenta
MARSLEPLVVGKVIGEVLDMYNPVAEFTVHYGSKQIANGCEIKPSAAAQKPHVHILGSRLSSDLYTLVMVDPDAPSPSEPKWREWLHWIVVDIPEGSDATKGHELVPYMGPQPPTGIHRYVFALFKQKGALKGRSLGPDGRGNFSTRQFAAQHGFGVPVAAVYFNSQKEPAVKKR

SEQ ID NO: 571 - protein, 173 aa, Marchantia polymorpha subsp. ruderalis
MARSNDPLVVGRVIGDVLEEFQPFAELTVKYAARQVSNGCELKPSAVAESPLVQVIDRNEPNALFTLVVTDPDAPSPSEPSAKEFLHWLVTDIPSGADASAGRQILPYEEPKPPIGIHRYVFAVFKQQQPLPLIAPSTRKKFNTKGFAQQFGLGKPAAAVYFNSQKETGARRR

SEQ ID NO: 572 - protein, 177 aa, Morus notabilis
MARSLEPLVVGKVIGDVVDMFSPAVELTVRYGSKQVGNGCEIKPSAAADRPKAQILGPPNHANLYTLVMVDPDAPSPSEPTLREWLHWIVVDIPEGLDATKGKEVVPYMGPKPPTGIHRYMFALFRQRSGTILAGNVPSPEARGNFRTRQFAAQYGLGLPVAAVYFNSQKEPGTRKR

SEQ ID NO: 573 - protein, 172 aa, Musa acuminata subsp. malaccensis
MAGYVDPLVVGRVIGDVVDLFVPTISMMVRFGLKHVNNGCDIKPSMAANPPSVQIAGRQADLYTLVMTDPDAPSPSDPTMREWLHWMVINMPGGTDPSRGQEAVPYMGPRPPVGIHRYVLVLFQQKSRLPGVAPPATRANFNTRSLAAQYDLGLPVATVYFNSQKEPAARRR

SEQ ID NO: 574 - protein, 173 aa, Musa acuminata subsp. malaccensis
MTKTLGPLAVGRVIGDVLDSFVPEMKLEVAYGHNKQVYNGHELMPSAVCGRPRVEIGGDDMRSFYTLVLTDPDAPSPSDPHSREHLHWIVTDIPGTTNASFGREIVSYEAPKPSIGIHRYVFVLFKQKGRRTVCVPASRDHFNTRSFSEESGLGLPVAAVYFNAQRETAARRR

SEQ ID NO: 575 - protein, 175 aa, Nelumbo nucifera
MRRSIEPLAVGKVIGDVLDMFSPTLEFTVHYGSKQVANGCEIKPSAAANKPKVQLSGSRLSNNLYTLVMTDPDAPSPSEPTMREWLHWIVVDIAEGSDATKGKELVSYMGPRPPTGIHRYVFTLFQQKGPITEETRPPDARGSFNTRNFAAQNGLGLPVAAVYFNAQKEPATRKR

SEQ ID NO: 576 - protein, 175 aa, Nelumbo nucifera
MGRSIEPLVVGKVIGDVLDMFTPTIEFTVHYGSKQIANGCEIKPSVVANKPRVHLSGSRLSNSLYTLVMTDPDAPSPSEPNLREWLNWIVVDIPEGSDATNGKEMVVYMGPSPPTGIHRYVFALFQQKGPMTEGIRLPVARSNFSTRSFAAEIGLGLPVAAVYFNAQKEPASRKR

SEQ ID NO: 577 - protein, 183 aa, Nicotiana attenuata
MANMVNPPRSVDPLVVGKVIGDVVDMFVPVVEFSVEYGSKQISNGVEIKPAAAAQKPRVHIQGSRGSNNLYTLVMADPDAPSPSEPTFREWLHWIVTDIAEGGDASEGRELMEYMGPQPPTGIHRYVFTLFRQTEAEQVPHKPPERRANFKTRQFASENGLGLPVAALYFNSQKGHAAANKKH

SEQ ID NO: 578 - protein, 184 aa, Nicotiana tomentosiformis
MANMVNPPRSVDPLVVGKVIGDVLDMFVPVIEFTVEYGSKKQISNGVEIKPAAAAQRPRVHIQGSRDSNNLYTLVMADPDAPSPSEPTFREWLHWIVTDIPEGGDASEGREVMEYMGAQPPTGIHRYVFTLFRQTEAEQVPHKPPERRANFNTRKFASDNGLGFPVAALYFNSHKEHAAANKKR

SEQ ID NO: 579 - protein, 176 aa, Oryza sativa Japonica Group
MASHVDPLVVGRVIGDVVDLFVPTTAMSVRFGTKDLTNGCEIKPSVAAAPPAVQIAGRVNELFALVMTDPDAPSPSEPTMREWLHWLVVNIPGGTDPSQGDVVVPYMGPRPPVGIHRYVMVLFQQKARVAAPPPDEDAARARFSTRAFADRHDLGLPVAALYFNAQKEPANRRRRY

SEQ ID NO: 580 - protein, 180 aa, Oxybasis rubra
MTTMVVRRSIDPLVVGRVIGDVLDMFVPMADFRVQYGTKHIFNGCEIKPSLASERPLVQISGLLSTDNLYTIIMIDPDAPSPSEPKMKEWLHWIIADIPQGMDASKGRELVEYMGPKPPTGIHRYVFVLFRQKGPIAKQWQLPQARNNFSTRNFAARNGLGLPVAAVYFNSQKEAANKKR

SEQ ID NO: 581 - protein, 179 aa, Panicum hallii
MAAHVDPLVVGRVIGDVVDLFVPTVAMSVRFGTKDLTNGCEIKPSIAADAPAVQIAGRANDLFTLIMTDPDAPSPSEPSMREWLHWLVVNIPGGTDPSQGELVVPYMGPRPPVGIHRYVMVAFQQKARMTAPPALAPGAEAARVGFTTRAFADRHDLGLPVAAMYFNAQKEPANRRRHY

SEQ ID NO: 582 - protein, 179 aa, Panicum hallii var. hallii
MAAHVDPLVVGRVIGDVVDLFVPTVAMSVRFGTKDLTNGCEIKPSIAADTPAVQIAGRANDLFTLIMTDPDAPSPSEPSMREWLHWLVVNIPGGTDPSQGELVVPYMGPRPPVGIHRYVMVVFQQKARMTAPPALAPGAEAARVGFTTRAFADRHDLGLPVAAMYFNAQKEPANRRRHY

SEQ ID NO: 583 - protein, 177 aa, Panicum miliaceum
MAARDTDPLVVGRVVGDVLDPFVRTTNLRVRYGARTVSNGCELKPSMVAQQPRVEVGGPDMRTFYTLVMVDPDAPSPSDPNLREYLHWLVTDIPGTTGASFGQEVVCYEPPRPAMGIHRFVLVLFQQLGRQTVYAPGWRQNFSTRDFAELYHLGAPVAAAYFNCQREAGSGGRRMYP

SEQ ID NO: 584 - protein, 179 aa, Panicum miliaceum
MAAHVDPLVVGRVIGDVVDLFVPTVAMSVRFGTKDLTNGCEIKPSIAADAPAVQIAGRANDLFTLIMTDPDAPSPSEPSMREWLHWLVVNIPGGTDPSQGEAVVPYMGPRPPVGIHRYVMVVFQQKARMTAPPALAPGAEAARVGFTTRAFADRHDLGLPVAAMYFNAQKEPANRRRHY

SEQ ID NO: 585 - protein, 175 aa, Parasponia andersonii
MARSIEPLVVGKVVGDVVDMFSPAAEFTVHYGPKQVSNGCEIKPSAAIDKPKVQILGPRNQTNLYTLVMVDPDAPSPSEPTLREWLHWLVVDIPEGFDCTKGKELVAYMGPQPPTGIHRYAFLLFRQRGGSLAGVTPPEGRSNFSTRQFAAHYGLGLPVAAVYFNSQKEPATRKR

SEQ ID NO: 586 - protein, 175 aa, Phoenix dactylifera
MASYVDPLVVGRVIGDVVDLFVPTMSMSVSYGSKHVNNGCDVKPSMAINPPTAQIAGQRADLYTLVMTDPDAPSPSDPTMREWLHWVVVNIPGGTDISRGEEAVAYMGPRPPLGIHRYVLVLFQQKSRFSMGAGVSLPASRANFNTRAFAARHDLGLPVAAVYFNAQKEPANRRR

SEQ ID NO: 587 - protein, 178 aa, Phyllostachys meyeri
MVGGDRDPLVVGRVVGDVIDPFVRTTNLRVSYGPRTTSNGCELKPSMVVHQPRVEVGGNEMRTFYTLVMVDPDAPSPSEPNLREYLHWLVTDIPGTTGAAFGQEVVCYESPRPTMGIHRFVFVLFQQLGRRTVHAPGRRENFNTRDFAALYNLGQPVAAVYFNCQREAGSGGRRMYPW

SEQ ID NO: 588 - protein, 175 aa, Picea abies
MARSVDPLVVGNVVGDVIDIFVRAADMTVHYGPKQVTNGCEIKPSATVHRPNLQIAGRHFDDNKLFTLVMTDPDAPSPSEPNMREWLHWIVTDIPGAADASQGREIVPYMGPRPPIGIHRYVFVAFRQQDPMVMMMAPQVRHNFSTRAFAAQYGLGLPVAAVYFNAQKEPANKKR

SEQ ID NO: 589 - protein, 174 aa, Picea abies
MARSTDPLVVGRVIGDVIDMFVPSNDMAVYYGSKQVRDGCEIKPSATVDRPKVQIAGRHFDDSLYTLVMTDPDSPSPSEPNMREWVHWVVTDIPGATDAAQGREILPYMGPRPPIGIHRYIFVLFKQSGPMVMMVPPQARNNFSTRAFASEYSLGLPVSAAYFNAQKEPGTRKR

SEQ ID NO: 590 - protein, 130 aa, Picea purpurea
GCEIKPSATVHRPNLQIAGRHFDDNKLFTLVMTDPDAPSPSEPNMREWLHWIVTDIPGAADASQGREIVPYMGPRPPIGIHRYVFVAFRQQDPMVMMMAPQVRHNFSTRAFAAQYGLGLPVAAVYFNAQK

SEQ ID NO: 591 - protein, 133 aa, Picea schrenkiana
VTNGCEIKPSATVHRPNLQIAGRHFDDNKLFTLVMTDPDAPSPSEPNMREWLHWIVTDIPGAADASQGREIVPYMGPRPPIGIHRYVFVAFRQQDPMVMMMAPQVRHNFSTRAFAAQYGLGLPVAAVYFNAQK

SEQ ID NO: 592 - protein, 174 aa, Picea sitchensis
MARSTDPLVVGRVIGDVIDMFVPSNDMAVYYGSKQVTNGCEIKPSATVDRPKVQIAGRHFDDSLYTLVMTDPDAPSPSEPNMREWVHWVVTDIPGATDAAQGREILPYMGPRPPIGIHRYIFVLFKQSGPMVMMMPPQARNNFSTRAFASEYSLGLPVSAAYFNAQKEPGTRKR

SEQ ID NO: 593 - protein, 174 aa, Pinus armandii
MARSTDPLVVGRVIGDVIDMFVPSMDMAVYYGSKQVTNGCEIKPSATVDRPNVQIAGRHFDESLYTLVMTDPDAPSPSEPNMREWVHWIVTDIPGATDAGQGREILPYMGPRPPIGIHRYIFVLFKQPGPMVMMMTPQARNNFSTRAFASQNSLGLPVSAAYFNAQKEPGTRKR

SEQ ID NO: 594 - protein, 175 aa, Pinus armandii
MARSVDPLVVGNVVGDVIDNFARAADMTVHYGPKQVTNGCEIKPSATVHRPNLQIAGRHFDDNKLFTLVMTDPDAPSPSEPNMREWLHWIVTDIPGTADASQGREIVPYMGPRPPIGIHRYVFVAFRQQNPMVVMMAPQVRHNFSTRAFAAQYGLGLPVAAVYFNAQKEPANKKR

SEQ ID NO: 595 - protein, 174 aa, Pinus sylvestris
MARSTDPLVVGRVIGDVIDMFVPSMDMAVYYGSKQVTNGCEIKPSATVDRPNVQIAGRHFDESLYTLVMTDPDAPSPSEPNMREWVHWIVTDIPGATDAAQGREILPYMGPRPPIGIHRYIFVLFKQPGPMVMMMPPQARNNFSTRAFASQYSLGLPVSAAYFNAQKEPGTRKR

SEQ ID NO: 596 - protein, 174 aa, Podocarpus macrophyllus
MARSTDPLVVGRVIGDVIDMFVPSVDMGVYYGSKQVTNGCEIKPSLTVNRPNVQISGRYFNDSLYTLVMIDPDAPSPSEPNLREWIHWLVTDIPGATDPTHGREILPYMAPRPPIGIHRYVFALFKQAGPMVMVIPPQQRNNFSTRAFGAHYGLGLPVACVYFNAQKEPGTRKR

SEQ ID NO: 597 - protein, 175 aa, Podocarpus macrophyllus
MAVRSVDPLVVGKVVGEVVDMFVPAVNMTVFYGSRQVTNGCEIKPSVTGTRPTVQLPRRQFDDALFTLVMTDPDAPSPSEPSMREWVHWIVTDIPGSSDASQGREILPYMGPRPPIGIHRYVFVLFKQQCPMMMMMAPQVRHNFSTRAFAAQYGLGLPVATVYFNAQKEPATRKR

SEQ ID NO: 598 - protein, 175 aa, Quercus suber
MARTIEPLIVGKVIGEVLDMFTPATNFTVHYGSKQVANGCDIKPSMAVDRPKVQILGPRVSTNLYTLIMVDPDAPSPSEPSLREWLHWIVVDIPEGSDATKGKELVPYMGPKPPTGIHRYIFVLFKQKSEMMVGCPPPDARGNFRTRQFAAQYELGLPVAAVYFNSQKEPATKKR

SEQ ID NO: 599 - protein, 175 aa, Saccharum hybrid cultivar
MANDSLTRGHIIGDVLDPFTGSVPLTVMYDGRPVFEGMEFRASGVSVKPRVEIGGDDFRVAYTLVMVDPDAPNPSNPTLREYLHWMVTDIPASTDDSFGRELIPYENPSPTMGIHRIVLVLYQQLGRGTVFAPQVRQNFNLRNFARRFNLGKPVAAMYFNCQRQTGTGGRRFTEH

SEQ ID NO: 600 - protein, 137 aa, Selaginella denticulata
GKQVNNGCELKPSATQSRPVVQVTAPNEEGNLFTLVMIDPDAPSPSEPSMREWVHWIVADIPANGDASQGKEILQYIGPKPPTGIHRYVFVVFRQVGPALMLPPLMRNNFSTRWFSREYFLGFPVAAVYYNAQKEPA

SEQ ID NO: 601 - protein, 146 aa, Selaginella erythropus
DVLDMFVPAVEMSVCYGSKQVNNGCELKPSATQARPLVQVGSAPEEGALYTLVMVDPDAPSPSEPSMREWVHWIVADIPSGADASQGREILQYIGPKPPTGIHRYVFVVFRQMGPVLMLPPLMRNNFSTRWFAQEYFLGLPVGAVY

SEQ ID NO: 602 - protein, 170 aa, Selaginella moellendorffii
MDPLVLGRVIGDVLDMFVPAVDMSVCYGSKQVNNGCELKPSATQARPIVQVGSPHEEGALYTLVMVDPDAPSPSEPSMREWVHWIVADIPGGADASQGREILQYIGPKPPTGIHRYIFVVFRQMGPVLMLPPLMRNNFSTRWFAQEYFLGLPVGAVYYNAQKEPASRRRT

SEQ ID NO: 603 - protein, 174 aa, Selaginella moellendorffii
MGRSMDPLVLGRVIGDVLDMFVPAVDMSVCYGSKQVNNGCELKPSATQARPIVQVGSPHEEGALYTLVMVDPDAPSPSEPSMREWVHWIVADIPGGADASQGREILQYIGPKPPTGIHRYIFVVFRQMGPVLMLPPLMRNNFSTRWFAQEYFLGLPVGAVYYNAQKEPASRRRT

SEQ ID NO: 604 - protein, 128 aa, Selaginella pallescens
KQVNNGCELKPSATQARPTVQVGSPQEEGALYTLVMVDPDAPSPSEPSMREWVHWIVADIPSGADASQGREILQYIGPKPPTGIHRYVFVVFRQMGPVLMLPPLMRNNFSTRWFAQEYFLGLPVGAVY

SEQ ID NO: 605 - protein, 173 aa, Sorghum bicolor
MANDSLTRGHIIGDVLDPFTSSVPLTVMYDGRPVFDGMEFRASAVSVKPRVEIGGDDFRVAYTLVMVDPDAPNPSNPTLREYLHWMVTDIPASTDDSFGRELIPYENPSPTMGIHRIVLVLYQQLGRGTVFAPQVRQNFNLRNFARRFNLGKPVAAMYFNCQRQTGTGGRRFT

SEQ ID NO: 606 - protein, 175 aa, Spinacia oleracea
MSRTHRDALVVGRVVGDVLDPFNKSVNMRVRYANRDVSNGCEFRPSEVVSQPRVEIGGDDLRTFYTLVMVDPDAPSPSNPHLREYSHWLVTDIPGTTDVSYGQELVCYESPSPTAGIHRFVFVLYRQLGRQTVYPPGWRQNFKTRDFAEIYNLGLPVAAVYFNCQREGGSGGRRL

SEQ ID NO: 607 - protein, 175 aa, Spinacia oleracea
MSRTHRDALVVGRVVGDVLDPFNKSVNMRVRYANRDVSNGCEFRPSEVVSQPRVEIGGDDLRTFYTLVMVDPDAPSPSNPHLREYLHWLVTDIPGTTDVSYGQELVCYESPSPTAGIHRFVFVLYRQLGRQTVYPPGWRQNFKTRDFAEIYNLGLPVAAVYFNCQREGGSGGRRL

SEQ ID NO: 608 - protein, 212 aa, Symplocarpus renifolius
MRIAGGTAPSTTAERLSVVVLVSAFASLSLLLPVATSRRSQLDALVAARVIPDVIDAFSPAAEVSARYGRRDVVDGCDIKPSESASRPAVWIRGRGCSGDNLYTLIMTDPDAPSPSNPSEREWLHWIVVDIPGECNAAKGKELVPYMGPEPPIGIHRYVFVVFKQNKTLGEVRPPLGRGHFKTRGFAAQNGLGLPVAALYFNATKEPAIRIY

SEQ ID NO: 609 - protein, 175 aa, Theobroma cacao
MARSVEPLVVGRVIGDVLDIFTPAAELTVHYSTKQVHNGCDIKPSSAADKPHVRILSPVVSSSLYTLVMVDPDAPTPSEPRLREWLHWIVVDIPEGHDATKGKEMVPYMGPQPPTGIHRYILVLFKQERATEGGCQLPDARANFSTRQFAAQNSLGLPVAAVYFNSQKEPAVKKR

SEQ ID NO: 610 - protein, 165 aa, Theobroma cacao
GRVIGDVLDIFTPAAELTVHYSTKQVHNGCDIKPSSAADKPHVRILSPVVSSSLYTLVMVDPDAPTPSEPRLREWLHWIVVDIPEGHDATKGKEMVPYMGPQPPTGIHRYILVLFKQERATEGGCQLPDARANFSTRQFAAQNSLGLPVAAVYFNSQKEPAVKKR

SEQ ID NO: 611 - protein, 175 aa, Theobroma cacao
MARSVEPLVVGRVIGDVLDIFTPAAELTVHYSTKQVHNGCDIKPSSAADKPHVRILSPVVSSSLYTLVMVDPDAPTPSEPRLREWLHWIVVDIPEGHDATKGREMVPYMGPQPPTGIHRYILVLFKQERATEGGCQLPDARANFSTRQFAAQNSLGLPVAAVYFNSQKEPAVKKR

SEQ ID NO: 612 - protein, 175 aa, Trema orientale
MARSIEPLVVGKVVGDVVDMFSPAAEFTVHYGPKQVSNGCEIKPSAAIDKPKVQILGPRNQTNFYTLVMVDPDAPSPSEPTLREWLHWLVVDIPEGFDATKGKELVAYMGPQPPTGIHRYVFVLFRQRGGSLAGVTPPDGRSNFSTRQFGAHYGLGLPVAAVYFNSQKEPATRKR

SEQ ID NO: 613 - protein, 173 aa, Triticum aestivum
MANDSLTRAQIVGDVLDPFVSSVPLTVMYDGRPVFNGMEFRSPAVSLKPNVDIGGDDFRVAYTLVMVDPDAPNPSNPTLREYLHWMVTDIPSSTNDSFGKEVVPYESPSPTMGIHRMVLVLYQQLGRGTVFAPQARQSFNSRSFARRFNLGKPVAAVYFNCQRPTGTGGRRFT

SEQ ID NO: 614 - protein, 175 aa, Triticum aestivum
MSRCVDPLVVGRVIGEVVDMFVPSVAMAVAYGARDLSNGCHVKPSLAADQPLVRISGRRNDLYTLVMTDPDAPSPSEPTMREYLHWIVVNVPGGTDATKGEVVVPYMGPRPPVGIHRYVLVLFEQKTRFPYVAAASPDDRAYFNTRAFAANHELGLPVAVVYFNSQKEPSGHRRR

SEQ ID NO: 615 - protein, 175 aa, Triticum monococcum subsp. aegilopoides
MSRFVDPLVVGRVIGEVVDMFVPSVAMAVAYGARDLSNGCHVKPSLAADQPLVRISGRRNDLYTLVMTDPDAPSPSEPTMREYLHWIVVNIPGGTDATKGEVVVPYMGPRPPVGIHRYVLVLFEQKTRFPYVPAASPDDRAYFNTRAFAANHELGLPVAVVYFNSQKEPSGHRRR

SEQ ID NO: 616 - protein, 175 aa, Vitis vinifera
MAGSLESLVVGKVIGDVVNMFTPAAEFTVHYGSRQVANGRMIPPSAAVDKPKVQIHGHRLSSNLYTLVMVDPDAPSPSEPTLREWLHWIVVDIPEGCDATQGREVVPYMGPQPPTGIHRYIFTLFKQKAAAMSGTLPPETRSNFSTRQFAAGNGLGPPVALVYFNSQKERTNRKH

SEQ ID NO: 617 - protein, 175 aa, Zamia furfuracea
MARSVDPLVVGKVIGDVIDMFVPSVHMSVHYGPKQVTNGCEIKPSTTVERPNVHVAAGRHSDDKLFTLVMTDPDAPSPSEPNMREWIHWIVTDIPGATDVTQGREILAYSCPRPPIGIHRYAFVLFRQQGPLLMMMAPQVRQNFSTREFAAEYGLGLPVATVYFNAQKEPANKKR

SEQ ID NO: 618 - protein, 175 aa, Zamia furfuracea
MARSIDPLVVGRLITDVIDTFVPSVDAAVYYGSKQVTNGCEIKPSAALQPPNVQVKTGRYYDESLYTLVMTDPDAPSPSEPSMREWVHWIVTDIPAGADASQGKEVLAYTGPKPPIGIHRYVFVAFKQRGPMPWVMPPQARNNFSTRAFAAHHGLGLPVAAVYFNAQKEPGPRKR

SEQ ID NO: 619 - protein, 187 aa, Zea mays
MANDSLTRGHIIGDVLDPFTSSVSLSVLYDGRPVFDGMEFRASAVSVKPRVEIGGDDFRVAYTLVMVDPDAPNPSNPSLREYLHWMVTDIPASTDDSFGRELIPYESPSPTMGIHRLVLVLYQQLGRGTVFAPQVRQNFNLRNFARRFNLGKPVAATYFNCQRQTGTGGRRFTCVFDHVVQGEGRQA

SEQ ID NO: 620 - protein, 172 aa, Zea mays
MARFVDPLVVGRVIGEVVDLFVPSISMTVAYDGSKDISNGCLLKPSATAAPPLVRISGRRNDLYTLIMTDPDAPSPSNPTMREYLHWIVINIPGGTDATKGEEVVEYMGPRPPVGIHRYVLVLFEQKTRVHAEAPGDRANFKTRAFAAAHELGLPTAVVYFNAQKEPASRRR

SEQ ID NO: 621 - protein, 172 aa, Zea mays
MARFVDPLVVGRVIGEVVDLFVPSISMTVAYDGSKDISNGCLLKPSATAAPPLVRISGRRNDLYTLIMTDPDAPSPSNPTMREYLHWIVINIPGGTDATKGEEVVEYMGPRPPVGIHRYVLVLFEQKTRVHAEAPGDRANFKTRAFAAAHELGLPTAVVYFNAQKEPANRRR

SEQ ID NO: 622 - protein, 176 aa, Ziziphus jujuba
MARSLEPLVVGKVIGDVVDMFGPAAEFTIHYGAKQITNGCEIKPSAAVDKPKTQILGPRDPSNYYTLVMVDPDAPSPSEPTLREWLHWIVVDIPEGMDAAEGREVVPYMGPQPPTGIHRYVFVLFRQKSSMMTKIRLDEGRSNFSTRQFASDNELGLPVAALYFNSQKEPGTKKRS

SEQ ID NO: 623 - protein, 187 aa, Homo sapiens
MPVDLSKWSGPLSLQEVDEQPQHPLHVTYAGAAVDELGKVLTPTQVKNRPTSISWDGLDSGKLYTLVLTDPDAPSRKDPKYREWHHFLVVNMKGNDISSGTVLSDYVGSGPPKGTGLHRYVWLVYEQDRPLKCDEPILSNRSGDHRGKFKVASFRKKYELRAPVAGTCYQAEWDDYVPKLYEQLSGK

SEQ ID NO: 624 - protein, 227 aa, Homo sapiens
MGWTMRLVTAALLLGLMMVVTGDEDENSPCAHEALLDEDTLFCQGLEVFYPELGNIGCKVVPDCNNYRQKITSWMEPIVKFPGAVDGATYILVMVDPDAPSRAEPRQRFWRHWLVTDIKGADLKKGKIQGQELSAYQAPSPPAHSGFHRYQFFVYLQEGKVISLLPKENKTRGSWKMDRFLNRFHLGEPEASTQFMTQNYQDSPTLQAPRERASEPKHKNQAEIAAC

SEQ ID NO: 625 - protein, 223 aa, Acinonyx jubatus
MDWTMKLATAALFLGLTMVVPRDEEDGDMCTYEALSDTDAVLCKGLEVFYPELGNIGCMFVPDCNNYRQKITHWDEPIVKFPGALEGATYILVMVDPDAPSRSSPKAQFWRHWLVTDIKGVDMKKGKIQGQELSAYQPPSPPAQSGFHRYQFFVYLQEGQNISLHSKENKTRGNWKMDKFLNRFHLSEPEASTQFMTENYQDSPNYQPPAGGSSEPTDKPKQS

SEQ ID NO: 626 - protein, 187 aa, Ailuropoda melanoleuca
MPVDLSKWSGPLSLQEVDERPQHPLQVKYTGTEIDELGKVLTPTQVKNRPTSISWDGIDPGKLYTLVMTDPDAPSRKDPKYREWHHFLVVNMKGNDVSSGTVLSDYVGSGPPKGTGLHRYVWLVYEQNGPLKCDEPILSNRSGDHRGKFKVASFRKKYELGPPVAGTCYQAEWDDYVPKLYEQLSGK

SEQ ID NO: 627 - protein, 201 aa, Ailuropoda melanoleuca
MPVDLSKWSGPLSLQEVDERPQHPLQVKYTGTEIDELGKVLTPTQVKNRPTSISWDGIDPGKLYTLVMTDPDAPSRKDPKYRQERLGTPGYPNRTWEWHHFLVVNMKGNDVSSGTVLSDYVGSGPPKGTGLHRYVWLVYEQNGPLKCDEPILSNRSGDHRGKFKVASFRKKYELGPPVAGTCYQAEWDDYVPKLYEQLSGK

SEQ ID NO: 628 - protein, 312 aa, Ailuropoda melanoleuca
MQMAEDILLEKGLLLHPRHGSQSRLSPLGVHEPPLKLPYSQHWQTLIASRAQTVGHPGGNLLPTLPSPETCQDFSAPCSHHSTALALLWVCVDWTMRLAVAALFLGLTMVVTRDEKEGDLCLYEALSDTDAVLCKGLEVFYPELGNIGCMFVPDCNNYRQKITHWAEPTVKFPGALEGATYILVMVDPDAPSRSSPKAQFWRHWLVTDIKGVDIKKGKVQGQELSPYQPPSPPAQSGFHRYQFFVYLQQTQNISLHSKENKTRGSWKMDKFLNRFHLSEPEASTQFMTQNYQDSPNYQTPRAGSSEPKDKPK

SEQ ID NO: 629 - protein, 223 aa, Aotus nancymaae
MGWTMRLATAALLLGLVVVLTGDENKNDLCAHRALLDEDAVLCQGLEVFYPELGSVGCMIVPDCNDYRQKITSWTEPIVKFPQAVDGVTYVLVMVDPDAPSRAEPRQRFWRHWLVTDIKGADLKKGKIQGQELSAYQAPSPPAHSGFHRYQFFVYLQEGKVISLLPKENKTRGSWKMDRFLNRFHLGKPEASTQFMTQNYQDLPTLQAPRGGASEPKHKRKQR

SEQ ID NO: 630 - protein, 187 aa, Balaenoptera acutorostrata scammoni
MPVDLSKWSGPLSLQEVDERPQHPLQVKYGGAEVDELGKVLTPTQVKNRPTSIAWDGLDPGKLYTLVLTDPDAPSRKDPKYREWHHFLVVNMKGNDVSSGTVLSDYVGSGPPKGTGLHRYIWLVYEQDRPLKCDEPILSNRSGDHRGKFKVANFRKKYELGAPVAGTCYQAEWDDYVPKLYEQLSGK

SEQ ID NO: 631 - protein, 187 aa, Balaenoptera acutorostrata scammoni
MPVDLSKRSGPLSLQEVDERPQHPLQVKYGGAEVDELGEVLTPTQVKNRPTSIAWDGLHPGKLYTLVLTDPDAPSRKDPKYREWHHFLVVNMKGNDISSGTVLSDYVGSGPPKGTGLHHCVWLVYEQDRPLKCDEPILSNRSGDHSGRFKVVNFRNKYELGAPGAGTCYQAEWDDYVPKLYEQLSGK

SEQ ID NO: 632 - protein, 441 aa, Balaenoptera acutorostrata scammoni
MEEQACTVDWPPPPDSHSSLGLRAVGTHESSGISSGCHFEDRSLLALDDHPGTIILWLRLSCGLREDRDHGQPMPGDQHRAHLLGMQAALRSQVRGAAQPRGTPPPSTALCTRPPSRAALLAFFSRDYYFGRLALRSWPGARRPYPSCSGPSYTGSPCPTTATIRQPRGCRDRWQRSFQLGGGPGPPKVLVSSGGLAAGAQAAPTFLPAEQRALSHQVPESWTMRLAVAALLLGLTMVVTGDEGDNDPCVYEALPDNDAVLCKGLKVSYPELGNLGCMVVPECNNYRQKITYWTKPIVKFPGALDGATYILVMVDPDAPSRSSPKARFWRHWLVTDIKGADMKKGKIQGQELSPYQPPSPPAQSGFHRYQFFVYLQEGKTISLLPKENKTRGSWKMDRFLSRFHLGEPEASTQFMTQNYQDTLDHQAPGRSSEPEAKPEPR

SEQ ID NO: 633 - protein, 188 aa, Bos mutus
MPVDLSKWSGPLSLQEVDERPQHPLQVKYAGGGGADRVGKVLTPTQVKNRPTSITWDGLDPGKLYTLVLTDPDAPSRKDPKYREWHHFLVVNMKGNNISSGTVLSDYVGSGPPKGTGLHRYVWLVYEQEGPLKCDEPILSNRSGDHRGKFKVASFRKKYELGAPVAGTCYQAEWDDYVPKLYEQLSGK

SEQ ID NO: 634 - protein, 223 aa, Bos mutus
MGWTMRLVTAALLLGLAVAVTGEEEDTDLCVYEALPDNDAVLCKGLKVFYPELGNIGCMIVPECNNYRQKITTWPEPIVKFPQALDDAAYILVMVDPDAPSRSSPKARFWRHWLVSDIKGSDMKIGKIQGQELSPYHPPSPPAHSGLHRYQFFVYLQEGRTISLSPKENKTRGSWKMDKFLSHFHLTEPEASTQFMTQYYLDGLSRQNPGVVSNETTDKPEPK

SEQ ID NO: 635 - protein, 187 aa, Bos taurus
MPVDLSKWSGPLSLQEVDERPQHPLQVKYGGAEVDELGKVLTPTQVKNRPTSITWDGLDPGKLYTLVLTDPDAPSRKDPKYREWHHFLVVNMKGNNISSGTVLSDYVGSGPPKGTGLRRYVWLVYEQEGPLKCDEPILSNRSGDHRGKFKVASFRKKYELGAPVAGTCYQAEWDDYVPKLYEQLSGK

SEQ ID NO: 636 - protein, 187 aa, Bos taurus
MPVDLSKWPGPLSLQEMDERPQHPLQVEYGGAEIDELGKVLTPTQVKNWPTSTTWDGLDLGKLYTLVLTDPDAPSGKDPKYREWHHFLVVNMKGNNISSGTVLSDYVGSGPPKGTGLHCYVWLVYEQKGPLKCDEPILSNRSGDHRGKFKVASFRKKYELGAPVAGTCYQAKWDDYVPKLYEQLSGK

SEQ ID NO: 637 - protein, 223 aa, Bos taurus
MGWTMRLVTAALLLGLAVAVTGEEEDADLCVYEALPDNDAVLCKGLKVFYPELGNIGCMIVPECNNYRQKITTWPEPIVKFPQALDDAAYILVMVDPDAPSRSSPKARFWRHWLVSDIKGSDMKIGKIQGQELSPYHPPSPPAHSGLHRYQFFVYLQEGRTISLSPKENKTRGSWKMDKFLSHFHLTEPEASTQFMTQYYLDGLSRQNPGVVSNETTDKPEPK

SEQ ID NO: 638 - protein, 187 aa, Bubalus bubalis
MPVDLSKWSGPLSLQEVDERPQHPLQVKYGGAEVDELGKVLTPTQVKNRPTSITWDGLDPGKLYTLVLTDPDAPSRKDPKYREWHHFLVVNMKGNNISSGTVLSDYVGSGPPKGTGLHRYVWLVYEQEGPLKCDEPILSNRSGDHRGKFKVASFRKKYELGAPVAGTCYQAEWDDYVPKLYEQLSGK

SEQ ID NO: 639 - protein, 222 aa, Bubalus bubalis
MGWTMRLATAALLLGLAVAVTGEEDTDLCVYEALPDNDAVLCKGLKVFYPELGNIGCMIVPECNNYRQKITTWPEPIVKFPQALDDAAYILVMVDPDAPSRSSPKARFWRHWLVSDIKGSDMKIGKIQGQKLSPYQPPSPPAHSGLHRYQFFVYLQEGRTISLSPKENKTRGSWKMDKFLSHFHLTEPEASTQFMTQYYLDGLSRQNPGVVSNETTDKPEPK

SEQ ID NO: 640 - protein, 187 aa, Callithrix jacchus
MPVDLSKWSGPLSLQEVDEQPQHPLHVTYGGAAVDELGKVLTPTQVKNRPTSISWDGLDSGKLYTLVLTDPDAPSRKDPKYREWHHFLVVNMKGNDISSGTVLSDYVGSGPPKGTGLHRYVWLVYEQDRPLKCDEPILSNRSGDHRGKFKVASFRKKYQLRAPVAGTCYQAEWDDYVPKLYEQLSGK

SEQ ID NO: 641 - protein, 223 aa, Callithrix jacchus
MGWAMRLATAALLLVLVAVVTGDENKNDLCAHTALLDEDAVLCQGLEVFYPELGSIGCMIVPDCNDYRQKITSWKEPIVKFPQAVDGATYVLVMVDPDAPSRAEPRQRFWRHWLVTDIKGTDLKKGKIKGQELSAYQAPSPPAHSGFHRYQFFIYLQEGKVISLLPKENKTRGSWKMDRFLNRFHLSEPEASTQFMTQNYQDSPTLQAPRGGASEPKHKRKWR

SEQ ID NO: 642 - protein, 187 aa, Callorhinus ursinus
MPVDLGKWSGPLSLQEVDERPQHALQVRYTGTEVDELGKVLTPTQVKNRPTSIGWDGLDPGKLYTLVLTDPDAPSRKDPKYREWHHFLVVNMKGNDIGSGTVLSDYVGSGPPKGTGLHRYVWLVYEQNGPLKCDEPILSSRSGDHRGKFKVASFRKKYELGPPVAGTCYQAEWDDYVPKLYEQLSGK

SEQ ID NO: 643 - protein, 219 aa, Callorhinus ursinus
MHWTMRLAAAALFLSLTMVVTRDMEDLCLYEALSDADAVLCKGLEVFYPELGNIGCMFVPDCNNYRQKITHWAEPLVKFPGALEGATYILVMVDPDAPSRSSPKAQFWRHWLVTDIKGADIKKGKVQGQELSPYQPPSPPVKSGFHRYQFFVYLQEKQNISLHSKENKTRGSWKMDKFLNRFHLSEPEASTQFMTQNYQDSPNYQTPGAGNSEPKDKPK

SEQ ID NO: 644 - protein, 210 aa, Camelus bactrianus
MLRICSYPALLWLSLLSALLSPAMPVDLSKWSGPLSLQEVDERPQHPLLVKYGGVEVDELGKVLTPTQVKNRPTSIAWDGLDADKLYTLVLTDPDAPSRKDPKYREWHHFLVVNMKGNNISSGTVLSDYVGSGPPKGTGLHRYVWLVYEQNSPLKCDEPILSNRSGDHRGKFKVASFRRKYGLGAPVAGTCYQAEWDDYVPKLYEQLSGK

SEQ ID NO: 645 - protein, 210 aa, Camelus dromedarius
MLRICSFPALLWLSLLSALLSPAMPVDLSKWSGPLSLQEVDERPQHPLLVKYGGVEVDELGKVLTPTQVKNRPTSIAWDGLDADKLYTLVLTDPDAPSRKDPKYREWHHFLVVNMKGNNISSGTVLSDYVGSGPPKGTGLHRYVWLVYEQNSPLKCDEPILSNRSGDHRGKFKVASFRKKYGLGAPVAGTCYQAEWDDYVPKLYEQLSGK

SEQ ID NO: 646 - protein, 210 aa, Camelus ferus
MLRICSFPALLWLSLLSALLSPAMPVDLSKWSGPLSLQEVDERPQHPLLVKYGGVEVDELGKVLTPTQVKNRPTSIAWDGLDADKLYTLVLTDPDAPSRKDPKYREWHHFLVVNMKGNNISSGTVLSDYVGSGPPKGTGLHRYVWLVYEQNSPLKCDEPILSNRSGDHRGKFKVASFRRKYGLGAPVAGTCYQAEWDDYVPKLYEQLSGK

SEQ ID NO: 647 - protein, 223 aa, Camelus ferus
MGWTMRLAVATLLLGLTMVVTGDDEDSDPCVYEALSNNDALLCKGLKVFYPELGDIGCMYVPVCNNYRQKISYWTEPIVKFPGALDGATYILVMVDPDAPSRSSPKARFWRHWLVTDIKGSDIRKGKIQGQELSPYEPPSPPAQSGFHRYQFFVYLQEGKTISLLPKENKTRGFWKMNKFLSRFHLGEPEASTQFMTQHYQDSPNLQTRGRGSSELQDKPKPR

SEQ ID NO: 648 - protein, 221 aa, Canis lupus dingo
MDWTMKLATAALFLGLTMVVTRDEDEGDMCLYEALSDTDAVLCKGLEVFYPELGNIGCMFVPDCNNYRQKITHWAEPIVKFPGALEGATYILVMVDPDAPSRSSPKAQFWRHWLVTDIKGTDIKKGKLQGQELSPYQPPSPPAQTGFHRYQFFVYLQEGKNISLHSKENKTRASWKMDKFLNRFHLSEPEASTQFMTQNYQDSPNYQTPGTGSSEPRDKPK

SEQ ID NO: 649 - protein, 230 aa, Canis lupus dingo
MAPTLLWVSMDWTMKLATAALFLGLTMVVTRDEDEGDMCLYEALSDTDAVLCKGLEVFYPELGNIGCMFVPDCNNYRQKITHWAEPIVKFPGALEGATYILVMVDPDAPSRSSPKAQFWRHWLVTDIKGTDIKKGKLQGQELSPYQPPSPPAQTGFHRYQFFVYLQEGKNISLHSKENKTRASWKMDKFLNRFHLSEPEASTQFMTQNYQDSPNYQTPGTGSSEPRDKPK

SEQ ID NO: 650 - protein, 237 aa, Canis lupus dingo
MGCEIEPRVRVSTLVSMDWTMKLATAALFLGLTMVVTRDEDEGDMCLYEALSDTDAVLCKGLEVFYPELGNIGCMFVPDCNNYRQKITHWAEPIVKFPGALEGATYILVMVDPDAPSRSSPKAQFWRHWLVTDIKGTDIKKGKLQGQELSPYQPPSPPAQTGFHRYQFFVYLQEGKNISLHSKENKTRASWKMDKFLNRFHLSEPEASTQFMTQNYQDSPNYQTPGTGSSEPRDKPK

SEQ ID NO: 651 - protein, 247 aa, Canis lupus dingo
MPARVCLLLILQPLESRGELLQRQVSMDWTMKLATAALFLGLTMVVTRDEDEGDMCLYEALSDTDAVLCKGLEVFYPELGNIGCMFVPDCNNYRQKITHWAEPIVKFPGALEGATYILVMVDPDAPSRSSPKAQFWRHWLVTDIKGTDIKKGKLQGQELSPYQPPSPPAQTGFHRYQFFVYLQEGKNISLHSKENKTRASWKMDKFLNRFHLSEPEASTQFMTQNYQDSPNYQTPGTGSSEPRDKPK

SEQ ID NO: 652 - protein, 187 aa, Canis lupus familiaris
MPVDLGKWSGPLSLQEVEERPQHALHVKYTGTEVDELGKVLTPTQVKNRPTSIAWDGLDPGKLYTLVLTDPDAPSRKDPKYREWHHFLVVNMKGNDISSGTVLSDYVGSGPPKGTGLHRYVWLVYEQSGPLKCDEPILSNRSGDHRGKFKVASFRKKYELGPPVAGTCYQAEWDDYVPKLCEQLSGK

SEQ ID NO: 653 - protein, 221 aa, Canis lupus familiaris
MDWTMKLATAALFLGLTMVVTRDEDEGDMCLYEALSDTDAVLCKGLEVFYPELGNIGCMFVPDCNNYRQKITHWAEPIVKFPRALEGATYILVMVDPDAPSRSSPKAQFWRHWLVTDIKGTDIKKGKLQGQELSPYQPPSPPAQTGFHRYQFFVYLQEGKNISLHSKENKTRASWKMDKFLNRFHLSEPEASTQFMTQNYQDSPNYQTPGTGSSEPRDKPK

SEQ ID NO: 654 - protein, 230 aa, Canis lupus familiaris
MAPTLLWVSMDWTMKLATAALFLGLTMVVTRDEDEGDMCLYEALSDTDAVLCKGLEVFYPELGNIGCMFVPDCNNYRQKITHWAEPIVKFPRALEGATYILVMVDPDAPSRSSPKAQFWRHWLVTDIKGTDIKKGKLQGQELSPYQPPSPPAQTGFHRYQFFVYLQEGKNISLHSKENKTRASWKMDKFLNRFHLSEPEASTQFMTQNYQDSPNYQTPGTGSSEPRDKPK

SEQ ID NO: 655 - protein, 237 aa, Canis lupus familiaris
MGCEIEPRVRVSTLVSMDWTMKLATAALFLGLTMVVTRDEDEGDMCLYEALSDTDAVLCKGLEVFYPELGNIGCMFVPDCNNYRQKITHWAEPIVKFPRALEGATYILVMVDPDAPSRSSPKAQFWRHWLVTDIKGTDIKKGKLQGQELSPYQPPSPPAQTGFHRYQFFVYLQEGKNISLHSKENKTRASWKMDKFLNRFHLSEPEASTQFMTQNYQDSPNYQTPGTGSSEPRDKPK

SEQ ID NO: 656 - protein, 247 aa, Canis lupus familiaris
MPARVCLLLILQPLESRGELLQRQVSMDWTMKLATAALFLGLTMVVTRDEDEGDMCLYEALSDTDAVLCKGLEVFYPELGNIGCMFVPDCNNYRQKITHWAEPIVKFPRALEGATYILVMVDPDAPSRSSPKAQFWRHWLVTDIKGTDIKKGKLQGQELSPYQPPSPPAQTGFHRYQFFVYLQEGKNISLHSKENKTRASWKMDKFLNRFHLSEPEASTQFMTQNYQDSPNYQTPGTGSSEPRDKPK

SEQ ID NO: 657 - protein, 223 aa, Capra hircus
MGWTMRLATAALLLGLTVAVTGEEEDNDVCVYEALPDNDAVLCKGLKVFYPELGNIGCMIVPECNNYRQKITTWPEPIVKFPQALEDAAYILVMVDPDAPSRSSPKARFWRHWLVSDIKGTDMKIGKIQGQELSPYQPPSPPAHSGLHRYQFFVYLQEGRTISLPPKENKTRGSWKMDKFLSHFHLTEPEASTQFMTQYYLDALSPQNPGGVSNVTTDKPEPK

SEQ ID NO: 658 - protein, 187 aa, Carlito syrichta
MPVDLSKWSGPLSLQEVDEKPQRPLQVAYGGAAVDELGKVLTPTQVKDRPTNVSWDGLDPGKLYTLVLTDPDAPSRKDPKYREWHHFLVVNMKGNDISSGTVLSDYVGSGPPKGTGLHRYVWLVYEQNRPLKCDEPILSNRSGDHRGKFKVASFRKKYELGPPVAGTCYQAEWDDYVPKLYEQLSGK

SEQ ID NO: 659 - protein, 187 aa, Castor canadensis
MPADLSKWSGPLSLQEVDERPQHPLRVTYGGVEVDELGKVLTPTQVKNRPSSIEWDGLDPGKLYTLVLTDPDAPSRKDPKYREWHHFLVVNMKGNDISSGTVLSDYVGSGPPSGTGLHRYVWLVYQQDKPLKCDEPILSNRSGDHRGKFKVAAFRKKYHLGAPVAGTCYQAEWDDYVPKLYEQLSGK

SEQ ID NO: 660 - protein, 218 aa, Castor canadensis
MKLAIAALWLGLVMVVTEDEDNSPCVYQKLLEEDTVMCKGLEVYYPEMGNVACMFVPECNNFRQKITYWPEPIVKFPGALDDATYMLVMVDPDAPSRSEPKEKFWRHWLVADIKGSDLKKGNIQGQELTVYNPPSPPVTTGFHRYQFFVYLQEEGIVSLLPKENKTRGSWKLDKFLSRFHLKEPEASTQFMTQNYQDSPIAKASEGDGNNPKDNLRQR

SEQ ID NO: 661 - protein, 187 aa, Cavia porcellus
MPADVSKWTGPLSLQEVDEQPKHPLRVSYGGVEVDELGKVLTPTQVKNRPTSISWDGLDSGKLYTLVMTDPDAPSRQSPKFREWHHFLVVNMKGNDISSGTVLSDYVGSGPPSGTGLHRYVWLVYEQDKPLKCDEPILSNRSGDHRGKFKVASFRKKYHLGPPVAGTCYQAEWDDYVPKLYEQLSGK

SEQ ID NO: 662 - protein, 209 aa, Cavia porcellus
MRLVTAVLWLGLLMVATGDDEDSSCIYEPLSDEDAILCKGLEVFYPELGNIGCMFIPDCNDYRQKITQWSKPTVKFSDALDDAKYILVMVDPDAPSRYNPRARFWRHWLVTDIEGTNLKRGMIQGRELSTYQPPSPPVHSGFHRYQFYLYLQEGKTINLLPKENKTRGSWEMDKFLYRFHLNEPEASTQFMTQNYQDSSTFQTSQAGGI

SEQ ID NO: 663 - protein, 210 aa, Cavia porcellus
MRLVTAVLWLGLLMVATGDDEDSSCIYEPLSDEDAILCNRGLEVFYPELGNIGCMFIPDCNDYRQKITQWSKPTVKFSDALDDAKYILVMVDPDAPSRYNPRARFWRHWLVTDIEGTNLKRGMIQGRELSTYQPPSPPVHSGFHRYQFYLYLQEGKTINLLPKENKTRGSWEMDKFLYRFHLNEPEASTQFMTQNYQDSSTFQTSQAGGI

SEQ ID NO: 664 - protein, 187 aa, Cebus capucinus imitator
MPVDLSKWSGPSSLQEVDEQPQHPLHLTYGGAAVDELGKVLTPTQAKNRPTSISWDGLDSGKLYTLVLTDPDAPSRKDPKYREWHHFLVVNMKGNDISSGTVLSDYVGSGPPQGTGLHRCVWLVYEQDRQLKCDEPILSNRSGDHRGKFKVASFPKKYQLGAPVAGTCYQAEWDDYVPKLYEQLSGK

SEQ ID NO: 665 - protein, 219 aa, Cebus capucinus imitator
MRLATAALLLGLVAVLTGDENKNDLCAHRALSDEDAVLCQGLEVFYPELGSVGCMIVPDCNDYRQKITSWTEPIVKFPQAVDGATYVLVMVDPDAPSRAEPRQRFWRHWLVADIKGADLKKGKIQGQELSAYQPPSPPAHSGFHRYQFFVYLQEGKVISLLPKENKTRGSWKMDRFLNRFRLGEPEASSQFMTQNYQDSSTLQAPRGGASEPKHKRKRG

SEQ ID NO: 666 - protein, 187 aa, Ceratotherium simum simum
MPVDLSKWSGPLSLQEVDEKPQHPLQVKYAGAEIDELGKVLTPTQVKNRPTSIAWDGLDPGKLYTLVMTDPDAPSRKDPKYREWHHFLVVNMKGNDISSGTVLSDYVGSGPPKGTGLHRYVWLVYEQDKPLRCDEPILSNRSGDHRGKFKVASFRKKYQLGSPVAGTCYQAEWDDYVPKLYEQLSGK

SEQ ID NO: 667 - protein, 223 aa, Ceratotherium simum simum
MGWKMSLAMAALLLGLTMVVTEDEEENDPCVYEALSDNDAVLCKGLEVFYPELGNVGCMFVPVCNNYRQKITSWAKPIVKFPGAMEGATYMLVMVDPDVPSRSSPKAQFWRHWLVTDIKGIDLKKGKIQGQELTAYQPPSPPAQSGFHRYQFFIYLQEEKTISLLPKENKTRGSWKMDRFLNRFHLSEPEASTQFMTQNYQDSPILQAPGGGSSEPKDKPKPT

SEQ ID NO: 668 - protein, 293 aa, Cercocebus atys
MNPRSKEDVGEFGHCFRGPQENEAHLIVYIRTPILVHLSSQPVRHSPKRESQPCELPWGWQLLLKASCFLVLKSSVLQNMHSYPKALLLFLNINPPFPVQIQEGRENVFALEGRGLEVFYPELGNIGCKIVPDCNNYRQKITSWMAPIVKFPGAVEGATYILLMVDPDAPSRAEPTQKFWRHWLVTDIEGADLKKGKIQGQELSPYQAPSPPAHSGFHRYQFFVYLQEGKVISLLPKENKTRGSWKMGIFLNRFHLGEPEASTQFMTQNYQDSPTLQAPGGGASKPKHKTRWR

SEQ ID NO: 669 - protein, 187 aa, Chinchilla lanigera
MPADVSKWTGPLSLQEVDEQPRHPLRVAYGGVEVDELGKVLTPTQVKNRPTSISWDGVDAGKLYTLVLTDPDAPSRQSPKFREWHHFLVVNMKGNDVSSGTVLSDYVGSGPPSGTGLHRYVWLVYEQDRQLKCDEPILSNRSGDHRGKFKVASFRKKYHLGAPVAGTCYQAEWDDYVPKLYEQLSGK

SEQ ID NO: 670 - protein, 281 aa, Chinchilla lanigera
MLVGHSVQPHPPSDSPEAVETSGLGGPGGVRGRGLAQGPAKAAVPSLPCAWDPQPPRVGPKAALPAPVPTNGTMRLVAAALWLGFLMVAPGDSEDSCVYEPLSDEDTMICKGLEVLYPELGNIGCMFIPDCNNYRQKITQWTKPIVKFSGALDDRKYILVMVDPDAPSRYNPTARFWRHWLVTDIQGTDLKRGKIKGQELSAYQPPSPPAHSGFHRYQFYIYRQEVKTINLLPKENRTRGSWEMDKFLYRFHLKEPEASTQFMMQNYQDSTTFQASREGGF

SEQ ID NO: 671 - protein, 282 aa, Chinchilla lanigera
MLVGHSVQPHPPSDSPEAVETSGLGGPGGVRGRGLAQGPAKAAVPSLPCAWDPQPPRVGPKAALPAPVPTNGTMRLVAAALWLGFLMVAPGDSEDSCVYEPLSDEDTMICNRGLEVLYPELGNIGCMFIPDCNNYRQKITQWTKPIVKFSGALDDRKYILVMVDPDAPSRYNPTARFWRHWLVTDIQGTDLKRGKIKGQELSAYQPPSPPAHSGFHRYQFYIYRQEVKTINLLPKENRTRGSWEMDKFLYRFHLKEPEASTQFMMQNYQDSTTFQASREGGF

SEQ ID NO: 672 - protein, 266 aa, Chlorocebus sabaeus
MDPGARAALLCQLRPIRGQAAVGVAWGGARGGRRLGRVLSLGRWVCAFPGQCAEASVSLLPPAPSLPRHSRLHALLGLAMPVDLSKWSGPLSLQEVDEQPQHPLHVTYAGAALDELGKVLTPTQVKNRPTSISWDGLDSGKLYTLVLTDPDAPSRKDPKYREWHHFLVVNMKGNDISSGTVLSDYVGSGPPKGTGLHRYVWLVYEQARPLKCDEPILSNRSGDHRGKFKVASFRKKYELGAPVAGACYQAEWDDYVPKLYEQLSGK

SEQ ID NO: 673 - protein, 223 aa, Chlorocebus sabaeus
MGWTVRLVTAALLLGLVMVITGDEDENNPCAQEALLDDDALVCQGLEVFYPELGNIACKVVPDCNNYRQKITSWMAPIVKFLGAVEGATYILMMVDPDAPSRAEPTQKFWRHWLVTDIEGADLKKGKIQGQELSAYQAPSPPAHSGFHRYQFFVYLQEGKVISLLPKENKTRGSWKMGIFLNRFHLGEPEASTQFMTQNYQDSPTLQAPRGGASKPKHKTRWR

SEQ ID NO: 674 - protein, 187 aa, Chrysochloris asiatica
MPVDLSKWSGPLSLQEVDEQPQHPLQVKYGGAEVDELGKVLTPTQVKNRPISITWDGLDSGKLYTLVLTDPDAPSRKDPKFREWHHFLVVNMKGNDVSSGTVLSDYVGSGPPKGTGLHRYVWLVYEQDRPLKCDEPILSNRSGDHRGKFKVASFRKKYELGSPVAGTCYQAEWDDYVPKLYEQLSGK

SEQ ID NO: 675 - protein, 223 aa, Chrysochloris asiatica
MSSTKKLATAILLLGLIMMVTGREEDNDPCIYEALYNNDVLLCKGLEVLYPEVGNISCVYVPDCSNYRQKITYWPEPIVKFRGALEDATYILIMVDPDAPSRSSPTSRFWRHWLVTDISGIDMKKGKIQGQELSSYQPPSPPAHTGFHRYQFFVYLQEGRTISLLSKENKTRGSWNMDKFLSRFHLSEPEASTQFLTQNYQDSSGLQSLGESGNEPKDKPKQK

SEQ ID NO: 676 - protein, 223 aa, Colobus angolensis palliatus
MGWTMRLVTAALLLGLVMVITGDEDENNPCAQEALLDEDTLVCQGLEVFYPELGNIGCKVVPDCNNYRQKITSWREPIVKFPEAVEGATYILVMVDPDAPSRAEPTQKFWRHWLVTDIEGANLKKGKIQGQELSAYQAPSPPAHSGFHRYQFFVYLQEGKVISLLPKENKTRGSWKMDIFLNRFHLGEPEASTQFMTQNYQDSPTLQAPRGGASKPKHKTRWR

SEQ ID NO: 677 - protein, 187 aa, Condylura cristata
MPADLSKWTGPLCLQEVDERPQHSLQVKYAGVEISELGVVLTPTQVKNRPTSIAWDGADPGKLYTLAMTDPDAPSRKDPKYREWHHFLVVNMKGNDISSGTVLSDYVGSGPPRGTGLHRYVWLVYAQDGPLKCDEPILSNRSGDHRGNFKVAAFRKKYQLGPPIAGTCYQAEWDDYVPRLYEQLSGK

SEQ ID NO: 678 - protein, 224 aa, Condylura cristata
MGWTMRLATAALFLGLTLVVNGVDEENNACTYEALPDNDAVLCKGLQVFYPELGNIGCMFVPDCNNYRQKITLWMEPIVKFPRAVEGASYILVMVDPDAPSRSSPKYRFWRHWLVTDIKGSDMKKGKIKGQELTAYQAPSPPAESGFHRYQFFVYLQPEKSISLLPKENKTRGSWNMDTFLNRFHLSEPEASTQFVTQNYQDSPDFLALSGGKTIETKENSKKR

SEQ ID NO: 679 - protein, 235 aa, Condylura cristata
MPRQPGQKEVPMGWTMRLATAALFLGLTLVVNGVDEENNACTYEALPDNDAVLCKGLQVFYPELGNIGCMFVPDCNNYRQKITLWMEPIVKFPRAVEGASYILVMVDPDAPSRSSPKYRFWRHWLVTDIKGSDMKKGKIKGQELTAYQAPSPPAESGFHRYQFFVYLQPEKSISLLPKENKTRGSWNMDTFLNRFHLSEPEASTQFVTQNYQDSPDFLALSGGKTIETKENSKKR

SEQ ID NO: 680 - protein, 187 aa, Cricetulus griseus
MPADISQWSGPLSLQEVDERPQHALRVAYAGVEVDELGKVLTPTQVKNRPSSISWDGLDPGKLYTLVLTDPDAPSRKDPKFREWHHFLVVNMKGNDISSGKVLSDYVGSGPPSGTGLHRYVWLVYEQDKPLNCDEPILSNRSGDHRGKFKVAAFRKKYHLGAPVAGTCYQAEWDDYVPKLYEQLSGK

SEQ ID NO: 681 - protein, 438 aa, Delphinapterus leucas
MGPSSPVEELRAEPRSPRSPPIHPPKVGELSLISPHRAHSHPLWIQSELHTLLPPAGLFPRERRPPCGPSQLVRGAPPPPSTVLCTRSPSRAALLAFFSRDYYFGRALSSAPRQAAAGCALLSSAGPPELARGPAALPLVQQPFLHRVTASNHGHRPTVPRLSRQVAEELWAGEAELCKGHSPVSLLLLENPATAGAQAAPTFLPAEQRALSHQVLKSWTMRLAVAALLLGLTMVATGDEGDKDPCVYEALPDNDTVLCKGLKVFYPELGNLSCMVVPECNNYRQKITYWTEPIVKFPGALDGATYILVMVDPDAPSRSSPKARFWRHWLVTDIKGADVKKGKIQGQELSPYQPPSPPAQSGFHRYQFFVYLQEGKTISLLPKENKTRGSWNMDRFLSRFHLGEPEASTQFMTQNYQDTLHHQAPGGSSEPKDKPEPR

SEQ ID NO: 682 - protein, 187 aa, Desmodus rotundus
MPVDLSQWSGPLSLQEVEERPQHPLQVKYSGVEVDELGKVLTPTQVKNRPTSIAWDGLDASKLYTLVLTDPDAPSRKDPKYREWHHFLVVNMKGGNIGSGTVLSDYVGSGPPKGTGLHRYVWLVYEQDKPLKCDEPILSNRSGDHRGKFKVASFRKKYQLGSPVAGTCYQAEWDDYVPKLYEQLSGK

SEQ ID NO: 683 - protein, 187 aa, Dipodomys ordii
MPADLSKWSGPLSLQEVDERPQHPLRVSYTGVEVDELGKVLTPTQVKNRPSSIEWEGCDSGKLYTLVLTDPDAPSRKDPKYREWHHFLVVNMKGNDVSSGTVLSDYVGSGPPSGTGLHRYVWLVYQQDKPLKCDEPILSNRSGDHRGKFKVAAFRKKYHLGAPVAGTCYQAEWDDYVPKLYEQLSGK

SEQ ID NO: 684 - protein, 187 aa, Echinops telfairi
MPVDLSKWSGPLSLQEVDERPQRPLQVAYGGAEVDELGKVLTPTQVKDRPTSITWDGLDSSKLYTLVLTDPDAPSRKDPKFREWHHFLVVNMKGNDISSGTILSDYVGSGPPKGTGLHRYVWLVYEQARPLKCDEPTLSNRSGDHRGKFKVASFRKKYELGSPVAGTCYQAEWDDYVPKLYEQLSGK

SEQ ID NO: 685 - protein, 187 aa, Elephantulus edwardii
MPVDLSKWSGPLSLQEVDQQPQHPLQIKYGGVEIDELGKVLTPTQVKNRPTSITWEGLDSGKLYTLVLTDPDAPSRKDPKFREWHHFLVVNMKGNDVSSGTVLSDYVGSGPPKGTGLHRYVWLVYEQDRPLKCDEPILSNRSGDHRGKFKVASFRKKYQLGSAVAGTCYQAEWDDYVPKLYEQLSGK

SEQ ID NO: 686 - protein, 187 aa, Enhydra lutris kenyoni
MPVDLSKWSGPLSLQEVDERPQHPLQVKYTGTEIDELGKVLTPTQVKNRPTSIAWDGLDPGKLYTLAMTDPDAPSRKDPKYREWHHFLVVNMKGNDISSGTVLSDYVGSGPPKGTGLHRYVWLVYEQNGPLKCDEPILSNRSGDHRGKFKVASFRKKYELGPPVAGTCYQAEWDDYVPKLYEQLSGK

SEQ ID NO: 687 - protein, 187 aa, Eptesicus fuscus
MPVDLGQWSGPLSLQEVDEKPKHPLQVKYSGAEVDELGKVLTPTQVKNRPSGISWDGLDSSKLYTLVLTDPDAPSRKDPKFREWHHFLVVNMKGNDISSGTVLSDYVGSGPPKGTGLHRYVWLVYEQAKPLKCDEPILSNRSGDHRGKFKVASFRKKYELGPPVAGTCYQAEWDDYVPKLYEQLAGK

SEQ ID NO: 688 - protein, 263 aa, Equus asinus
  misc_feature (218)..(218): Xaa can be any naturally occurring amino acid
MGWTMRLAVAALFLGVTMVATEDEDENDPCVYEALPDNDAVLCKGLEVFYPELGNIGCMFVPVCNNYRQKITHWPEPIVKFPWAMEGATYILVMVDPDAPSRSSPSAQFWRHWLVTDIKGIDLKKGKIQGQELTAYQPPSPPAQSGFHRYQFFIYLQEEKTISLLPKENKTRGSWKMDRFLNRFHLNEPEASTQFMTQNYQDSPILQAPDQGSSEPKXQNQAEITACQTLGFTGRCVSPLPPPMVWCGTPSHQNFKKRSSSAY

SEQ ID NO: 689 - protein, 187 aa, Equus caballus
MPVDLGKWSGPLSLQEVDEQPQHPLQVRYAGAEIDELGKVLTPTQVKNRPTSIAWDGLDPGKLYTLVLTDPDAPSRKDPKYREWHHFLVVNMKGNDISSGTVLSDYVGSGPPKGTGLHRYVWLVYEQGGPLKCDEPILSNRSGDHRGKFKVASFRKKYKLGSPVAGTCYQAEWDDYVPKLYEQLSGK

SEQ ID NO: 690 - protein, 263 aa, Equus caballus
  misc_feature (218)..(218): Xaa can be any naturally occurring amino acid
MGWTMRLAVAALFLGVTMVATEDEDENDPCVYEALPDNDAVLCKGLEVFYPELGNVGCMFVPVCNNYRQKITHWPEPIVKFPWAMEGATYILVMVDPDAPSRSSPSAQFWRHWLVTDIKGIDLKKGKIQGQELTAYQPPSPPAQSGFHRYQFFIYLQEEKTISLLPKENKTRGSWKMDRFLNRFHLNEPEASTQFMTQNYQDSPILQAPDQGSSEPKXQNQAEITACQTLGFTGRCVSPLPPPMVWCGTPSHQNFKKRSSSAY

SEQ ID NO: 691 - protein, 187 aa, Equus przewalskii
MPVDLGKWSGPLSLQEVDEQPQHPLQVRYAGAEIDELGKVLTPTQVKNRPTSIAWDGLDPGKLYTLVLTDPDAPSRKDPKYREWHQFLVVNMKGNDISSGTVLSDYVGSGPPKGTGLHRYVWLVYEQGGPLKCDEPILSNRSGDHRGKFKVASFRKKYKLGSPVAGTCYQAEWDDYVPKLYEQLSGK

SEQ ID NO: 692 - protein, 223 aa, Equus przewalskii
MGWTMRLAVAALFLGVTMVATEDEDENDPCVYEALPDNDAVLCKGLEVFYPELGNVGCMFVPVCNNYRQKITHWPEPIVKFPWAMEGATYILVMVDPDAPSRSSPSAQFWRHWLVTDIKGIDLKKGKIQGQELTAYQPPSPPAQSGFHRYQFFIYLQEEKTISLLPKENKTRGSWKMDRFLNRFHLNEPEASTQFMTQNYQDSPILQAPDQGSSEPKNKTKPR

SEQ ID NO: 693 - protein, 187 aa, Erinaceus europaeus
MPVDLSKWSGPLSLQEVDEQPQHPLQVKYSGSEVDELGKVLTPTQVKDRPISITWDGLDSGKLYTLVLTDPDAPSRKDPKYREWHHFLVVNMKGNDISSGTVLSDYVGSGPPKGTGLHRYVWLVYEQNRQLKCDEPILSNRSGDHRGKFKVASFRKKYELGSPVAGTCYQAEWDDYVPKLYEQLSGK

SEQ ID NO: 694 - protein, 220 aa, Erinaceus europaeus
MGWNMRLATAALLLGIVIGAADEEENNKCVYETLPDIETGLCSGLDVFYPELGNIACMLIPDCNNYRQKITAWGEPIVKFPEAMEGAYYILVMVDPDAPSRASPKARYWRHWLVTDIKGTDMKRGDIKGQELSAYQPPSPPPQTGFHRYQFFVYLQQEKVISLLPKENKTRASWKMDKFLNRYHLGEPEASTQFMTQNYQDSPDFQNATEVEEEIDEPKN

SEQ ID NO: 695 - protein, 187 aa, Felis catus
MPVDLSKWSGPLSLQEVDERPQHPLQVKYTGAEVDELGKVLTPTQVKNRPTSIAWDGLDPGKLYTLVMTDPDAPSRKDPKYREWHHFLVVNMKGNDISSGTVLSDYVGSGPPKGTGLHRYVWLVYEQNGPLKCDEPILSNRSGDHRGKFKVASFRKKYELGPPVAGTCYQAEWDDYVPKLYEQLSGK

SEQ ID NO: 696 - protein, 223 aa, Felis catus
MGWTMKLATAALFLGLTMVVPRHEEDGDMCMYEALSDTDAVLCKGLEVFYPELGNIGCMFVPDCNNYRQKITHWDEPIVKFPGALEGATYILVMVDPDAPSRSSPKAQFWRHWLVTDIKGVDMKKGKIQGQELSAYQPPSPPAQSGFHRYQFFVYLQEGQNISLHSKENKTRGNWKMDKFLNRFHLSEPEASTQFMTENYQDSPNYQPPARGSSEPTDKPKQS

SEQ ID NO: 697 - protein, 187 aa, Fukomys damarensis
MPADVSKWTGPLSLQEVEEQPKHPLRVAYGGVEVDELGKVLTPTQVKNRPTSISWDGLDPGKLYTLVLTDPDAPSRQSPKFREWHHFLVVNMKGNDISSGTVLSDYVGSGPPSGTGLHRYVWLVYEQDKPLKCDEPILSNRSGDHRGKFKVAAFRKKYQLGAPLAGTCYQAEWDDYVPKLYEQLSGK

SEQ ID NO: 698 - protein, 247 aa, Fukomys damarensis
MNEQAFWRKGAGTRHQMNPQRPRAEKRLDKVEKVSTDGTMMLVAATLCLGLLMVAAGDKEDECVYKPLSDEDAVLCKGLEVLCPELGNIGCMFIPDCNDYRQKITRWSEPIVKFSGALNDEKYILVMVDPDVPSRYNPRARFWRHWLVTDTQGSDLQKGKIKGQELSAYQPPSPPPHSGFHRYQFYVYLQEGKTINLLPKENKTRGSWEMDRFLYRFHLNEPEASTQFMTQNYQDSAVFQASGESGR

SEQ ID NO: 699 - protein, 208 aa, Fukomys damarensis
MMLVAATLCLGLLMVAAGDKEDECVYKPLSDEDAVLCKGLEVLCPELGNIGCMFIPDCNDYRQKITRWSEPIVKFSGALNDEKYILVMVDPDVPSRYNPRARFWRHWLVTDTQGSDLQKGKIKGQELSAYQPPSPPPHSGFHRYQFYVYLQEGKTINLLPKENKTRGSWEMDRFLYRFHLNEPEASTQFMTQNYQDSAVFQASGESGR

SEQ ID NO: 700 - protein, 248 aa, Fukomys damarensis
MNEQAFWRKGAGTRHQMNPQRPRAEKRLDKVEKVSTDGTMMLVAATLCLGLLMVAAGDKEDECVYKPLSDEDAVLCNRGLEVLCPELGNIGCMFIPDCNDYRQKITRWSEPIVKFSGALNDEKYILVMVDPDVPSRYNPRARFWRHWLVTDTQGSDLQKGKIKGQELSAYQPPSPPPHSGFHRYQFYVYLQEGKTINLLPKENKTRGSWEMDRFLYRFHLNEPEASTQFMTQNYQDSAVFQASGESGR

SEQ ID NO: 701 - protein, 209 aa, Fukomys damarensis
MMLVAATLCLGLLMVAAGDKEDECVYKPLSDEDAVLCNRGLEVLCPELGNIGCMFIPDCNDYRQKITRWSEPIVKFSGALNDEKYILVMVDPDVPSRYNPRARFWRHWLVTDTQGSDLQKGKIKGQELSAYQPPSPPPHSGFHRYQFYVYLQEGKTINLLPKENKTRGSWEMDRFLYRFHLNEPEASTQFMTQNYQDSAVFQASGESGR

SEQ ID NO: 702 - protein, 187 aa, Galeopterus variegatus
MPVDLSKWSGPLSLQEVEERPQHPLQVTYGGVVVDELGKVLTPTQVKNRPTSIEWDGLDPGKLYTLVLTDPDAPSRKDPKYREWHHFLVVNMKGNDISSGIVLSDYVGSGPPKGTGLHRYIWLVYEQDRLLKCDEPILSNRSGDHRGKFKVASFRKKYELGPPVAGSCYQAEWDDYVPKLYEQLSGK

SEQ ID NO: 703 - protein, 187 aa, Gorilla gorilla gorilla
MPVDLSKWSGPLSLQEVDEQPQHPLHVTYAGTAVDELGKVLTPTQVKNRPTSISWDGLDSGKLYTLVLTDPDAPSRKDPKYREWHHFLVVNMKGNDISSGTVLSDYVGSGPPKGTGLHRYVWLVYEQDRPLKCDEPILSNRSGDHRGKFKVASFRKKYELRAPVAGTCYQAEWDDYVPKLYEQLSGK

SEQ ID NO: 704 - protein, 223 aa, Gorilla gorilla gorilla
MGWTMRLVTAALLLGLMMVVTGDEDENSPCAHEALLDEDTLFCQGLEVFYPELGNIGCKVVPDCHNYRQKITSWMEPIVKFPGAVDGATYILVMVDPDAPSRAEPRQRFWRHWLVTDIKGADLKKGKIQGQELSAYQAPSPPAHSGFHRYQFFVYLQEGKVISLLPKENKTRGSWKMDRFLNRFHLGEPEASTQFMTQNYQDSPTLQAPRGRASEPKHKTRRR

SEQ ID NO: 705 - protein, 187 aa, Heterocephalus glaber
MPADVSKWTGPLSLQEVEEQPQHPLRVAYGGVEVDELGKVLTPTQVKNRPTSISWDGLDPGKLYTLVLTDPDAPSRQSPKFREWHHFLVVNMKGNDISSGTVLSDYVGSGPPSGTGLHRYVWLVYEQDKPLKCDEPILSNRSGDHRGKFKVADFRKKYQLGAPVAGMCYQAEWDDYVPKLYEQLSGK

SEQ ID NO: 706 - protein, 185 aa, Hipposideros armiger
MDLSKWSGPLSLQEVDEQPQHPLQVKYSGVEVNELGKVLTPTQVKDRPTSIAWDGLDPGKLYTLVLTDPDAPSRKDPKYREWHHFLVVNMKGNDISSGTVLSDYVGSGPPKGTGLHRYVWLVYEQDKPLKCDEPILSNRSGDHRGKFKVAAFRKKYGLGSPVAGSCYQAEWDDYVPKLYEQLSGK

SEQ ID NO: 707 - protein, 223 aa, Homo sapiens [sequence omitted]

SEQ ID NO: 708 - protein, 223 aa, Homo sapiens
MGWTMRLVTAALLLGLMMVVTGDEDENSPCAHEALLDEDTLFCQGLEVFYPELGNIGCKVVPDCNNYRQKITSWMEPIVKFPGAVDGATYILVMVDPDAPSRAEPRQRFWRHWLVTDIKGADLKEGKIQGQELSAYQAPSPPAHSGFHRYQFFVYLQEGKVISLLPKENKTRGSWKMDRFLNRFHLGEPEASTQFMTQNYQDSPTLQAPRGRASEPKHKTRRR

SEQ ID NO: 709 - protein, 227 aa, Homo sapiens [sequence omitted]

SEQ ID NO: 710 - protein, 186 aa, human, brain, Peptide, 186 aa
PVDLSKWSGPLSLQEVDEQPQHPLHVTYAGAAVDELGKVLTPTQVKNRPTSISWDGLDSGKLYTLVLTDPDAPSRKDPKYREWHHFLVVNMKGNDISSGTVLSDYVGSGPPKGTGLHRYVWLVYEQDRPLKCDEPILSNRSGDHRGKFKVASFRKKYELRAPVAGTCYQAEWDDYVPKLYEQLSGK

SEQ ID NO: 711 - protein, 188 aa, Jaculus jaculus
MPVDLSKWSGPLSLQEVDERPQHPLRVTYGGGVEVDELGKVLTPTQVKNRPTSISWDGLDPGKLYTLVLTDPDAPSRKDPKFREWHHFLVVNMKGNDISSGTVLSDYVGSGPPKGTGLHRYVWLVYEQDKPLKCDEPILSNRSGDHRGKFKVAAFRKKYHLGTPLAGTCYQAEWDDYVPKLYEQLSGK

SEQ ID NO: 712 - protein, 219 aa, Jaculus jaculus
MRLAERAVWLSLVLVVAKDMDENDPCVYETLPKEDTGLCKDLQVFYPELGDVGCRYVPECNNYRQKITHWTEPLVTFPGAVDGATYILMMVDPDAPSRSQPRARFWRHWLVTDIKGIDMKKGKIQGQELTAYQPPSPPATTGFHRYQFLVYLQEEKAIYLLPKENKTRGSWKMDKFLKRFHLSEPETSTQFMTKSYQDSPTFQASEGGGRVSKIKPRHT

SEQ ID NO: 713 - protein, 218 aa, Lagenorhynchus obliquidens
MRLAVAALLLGLTMMATGDQGDKDPCVYEALPDNDAVLCKGLKVFYPELGNLGCMVVPECNNYRQKITYWTEPILKFPGALDDAAYILVMVDPDAPSRSSPKARFWRHWLVTDIKGADMKKGKIQGQELSPYQPPSPPAQSGFHRYQFFVYLQEGKTISLLPKENKTRGSWNMDRFLSRFHLGEPEASTQFMTQNYQDTLHHQAPGGSSEPKDKPEPR

SEQ ID NO: 714 - protein, 187 aa, Leptonychotes weddellii
MPVDLGKWSGPLSLQEVDERPQHALQVKYAGTEVDELGKVLTPTQVKNRPTSIGWDGLDPGKLYTLVLTDPDAPSRKDPKYREWHHFLVVNMKGNNISSGTVLSDYVGSGPPKGTGLHRYVWLVYEQNGPLKCDEPILSNRSGDHRGKFKVASFRKKYELGPPVAGTCYQAEWDDYVPKLYEQLSGK

SEQ ID NO: 715 - protein, 187 aa, Leptonychotes weddellii
MPVDLGKWSGPLSLQEVDERPQHALQVKYAGTEVDELGKVLTPTQVKNRPTSIGWDGLDPGKLYTLVLTDPDAPSRKDPKYRQWHHFLVVNMKGNNISSGTVLSDYVGSGPPKGTGLHRYVWLVYEQNGPLKCDEPILSNRSGDHRGKFKVASFRKKYELGPPVAGTCYQAEWDDYVPKLYEQLSGK

SEQ ID NO: 716 - protein, 187 aa, Lipotes vexillifer
MPVDLSKWSGPLSLQEVDERPQHPLQVKYGGAEVDELGKVLTPTQVKNRPTSIAWDGLDPGKLYTLVLTDPDAPSRKDPKYREWHHFLVVNMKGNDISSGTVLSDYVGSGPPKGTGLHRYIWLVYEQDRPLKCDEPILSNRSGDHRGKFKVANFRKKYELGAPVAGTCYQAEWDDYVPKLYEQLSGK

SEQ ID NO: 717 - protein, 218 aa, Lipotes vexillifer
  misc_feature (136)..(136): Xaa can be any naturally occurring amino acid
MRLAAAALLLGLTMVATGDEGDKDPCVYEALPDNDAVLCRGLKVFYPELGNLGCMVVPECNNYRQKITYRTEPIVKFPGALDGATYILVMVDPDAPSRSSPKARFWRHWLVTDIKGADMKKGKIQGQELSPYQPPXPAAQSGFHRYQFFVYLQEGKTISLLPKENKTRGSWKMDRFLSRFHMGEPEASTQFMTQNYQDTLHHQAPGGSSEPKDKSEPR

SEQ ID NO: 718 - protein, 187 aa, Loxodonta africana
MPVDLSKWSGPLSLQEVDERPQQPLQVKYGGAEIDELGKVLTPTQVKNRPTSIAWDGLDSGKLYTLVLTDPDAPSRKDPKYREWHHFLVVNMKGNDISSGTVLSDYVGSGPPKGTGLHRYVWLVYEQDRPLKCDEPILSNRSGDNRGKFKVASFRKKYGLRSPIAGTCYQAEWDDYVPKLYEQLSGK

SEQ ID NO: 719 - protein, 187 aa, Macaca fascicularis
MPVDLSKWSGPLSLQEVDEQPQHPLHVTYAGAALDELGKVLTPTQVKNRPTSISWDGLDSGKLYTLVLTDPDAPSRKDPKYREWHHFLVVNMKGNDISSGTVLSDYVGSGPPKGTGLHRYVWLVYEQARPLKCDEPILSNRSGDHRGKFKVASFRKKYELGAPVTGACYQAEWDDYVPKLYEQLSGK

SEQ ID NO: 720 - protein, 223 aa, Macaca fascicularis
MGWTMRLVTAALLLGLVMVITGDEDENNLCAQEALLDEDALVCQGLEVFYPELGNIGCKVVPDCNNYRQKITSWMAPIVKFPGAVEGATYILLMVDPDAPSRAEPTQKFWRHWLVTDIEGADLKKGKIQGQELSAYQAPSPPAHSGFHRYQFFVYLQEGKVISLLPKENKTRGSWNMGIFLNRFHLGEPEASTQFMTQNYQDSPTLQAPRGGASKPKHKTRWR

SEQ ID NO: 721 - protein, 187 aa, Macaca mulatta
MPVDLSKWSGPLSLQEVDEQPQHPLHVTYAGAALDELGKVLTPTQVKNRPTSISWDGLDSGKLYTLVLTDPDAPSRKDPKYREWHHFLVVNMKGNDISSGTVLSDYVGSGPPKGTGLHRYVWLVYEQARPLKCDEPILSNRSGDHRGKFKVASFRKKYELGAPVAGACYQAEWDDYVPKLYEQLSGK

SEQ ID NO: 722 - protein, 187 aa, Macaca mulatta
MPVDLSKWSGPLSLQEVDEQPQHPLHVTYAGAALDELGKVLTPTQVKNRPTSISWDGLDSGKLYTLVLTDPDAPSRKDPKYREWHHFLAVNIKGSDISSGTVLSDYVGSGPPKGTGLHRYVWLVYEQARPLKCDEPILSNRSGDHRGKFKVASFRKKYELGAPVAGACYQAEWDDYVPKLYEQLSGK

SEQ ID NO: 723 - protein, 223 aa, Macaca mulatta
MGWTMRLVTAALLLGLVMVITGDEDENNPCAQEALLDEDALVCQGLEVFYPELGNIGCKVVPDCNNYRQKITSWMAPIVKFPGAVEGATYILLMVDPDAPSRAEPTQKFWRHWLVTDIEGADLKKGKIQGQELSAYQAPSPPAHSGFHRYQFFVYLQEGKVISLLPKENKTRGSWNMGIFLNRFHLGEPEASTQFMTQNYQDSPTLQAPRGGASKPKHKTRWR

SEQ ID NO: 724 - protein, 274 aa, Macaca nemestrina
MDPGARAALLCQLRPIRGQAAVGVAWGGARGGRWLGRVLSLGRWFCAFPGQFAEASVSLLPPAPSLPLPPAPSLPRHARLHALLGLAMPVDLSKWSGPLSLQEVDEQPQHPLHVTYAGAALDELGKVLTPTQVKNRPTSISWDGLDSGKLYTLVLTDPDAPSRKDPKYREWHHFLVVNMKGNDISSGTVLSDYVGSGPPKGTGLHRYVWLVYEQARPLKCDEPILSNRSGDHRGKFKVASFRKKYELGAPVAGACYQAEWDDYVPKLYEQLSGK

SEQ ID NO: 725 - protein, 223 aa, Mandrillus leucophaeus
MGWTMRLVTAALLLGLVMVITGDEDKNNPCAQEALLDEDALVCQGLEVFYPELGNIGCKVVPDCNNYRQKITSWMAPIVKFPGAVEGATYILLMVDPDAPSRAEPTQKFWRHWLVTDIEGADLKKGKIQGQELSAYQAPSPPAHSGFHRYQFFVYLQEGKVISLLPKENKTRGSWKMGIFLNRFHLGEPEASTQFMTQNYQDSPTLQAPRGGVSKPKHKTRWR

SEQ ID NO: 726 - protein, 187 aa, Manis javanica
MPVDVSKWSGPLSLQEVDERPQHPLQVKYAGVEIDELGKVLTPTQVKNRPTTIAWDGLDSGKLYTLVMTDPDAPSRKDPKYREWHHFLVVNMKGNDVSSGTVLSDYVGSGPPKGTGLHRYVWLVYEQDRPLKCDEPILSNRSGDHRGKFKVASFRKKYGLGTPVAGTCYQAEWDDYVPKLYEQLSGK

SEQ ID NO: 727 - protein, 225 aa, Manis javanica
MGWQMRLATAALFLGLTMAVTGDGGKEENDACVYEAVPDNDAVLCRGLKVSYPELGNLGCMFVPDCNNYRQKITYWNEPVVKFPGALEGATYLLVMVDPDAPSRSSPKARFWRHWLVTDIKGVDMKKGKIQGRELSPYQPPSPPAQTGFHRYQFFVYLQEGKTISLLPKENKTRGSWKMDSFLNRFHLSKPEASTQFMTQNYQDSSGLQVPAGMNRESKSKPRQR

SEQ ID NO: 728 - protein, 187 aa, Meriones unguiculatus
MPADISQWAGPLSLQEVDERPQHALRVVYAGVEVDELGKVLTPTQVKNRPSSISWDGLDPGKLYTLVLTDPDAPSRKDPKFREWHHFLVVNMKGNDISSGTVLSDYVGSGPPSGTGLHRYVWLVYEQDKPLSCDEPVLSNRSGDHRGKFKVAAFRKKYHLGAPVAGTCYQAEWDDYVPKLYEQLSGK

SEQ ID NO: 729 - protein, 187 aa, Mesocricetus auratus
MPADISQWSGPLSLQEVDERPQHALRVAYAGVEVDELGKVLTPTQVKNRPSSISWDGLDPGKLYTLVLTDPDAPSRKDPKFREWHHFLVVNMKGNDIGSGKVLSDYVGSGPPSGTGLHRYVWLVYEQDKPLNCDEPILSNRSGDHRGKFKVAAFRKKYHLGAPVAGTCYQAEWDDYVPKLYEQLSGK

SEQ ID NO: 730 - protein, 187 aa, Mesocricetus auratus
MPADISKWAGPLSLQEVDERPQHPLRVTYAGVELDELGQVLTPTQVKNRPSSISWDGLDPGKLYTLVLTDPDAPSRKEPKYREWHHFLVVNMKGNDISSGKVLSDYVGSGPPSGTGLHRYVWLVYEQDKPLKCDEPVLSNRSGDNRGKFKVAAFRKKYHLGAPVAGTCYQAEWDDYVPKLYKQLSGK

SEQ ID NO: 731 - protein, 187 aa, Microcebus murinus
MPVDLSKWSGSLSLQEVDERPRHPLQVTYSGSAVDELGKVLTPTQVQSRPTSITWDGLDPDKLYTLVLTDPDAPSRKDPKYREWHHFLVVNMKGNNISSGTVLSDYVGSGPPKGTGLHRYVWLVYEQDRPLKCDEPILSNRSGDHRGKFKVASFRKKYELGAPVAGTCYQAEWDDYVPKLYEQLSGK

SEQ ID NO: 732 - protein, 280 aa, Microcebus murinus
MERLAVQSRGLQGEGPPPGLQIESSLEEAQVLPRYSCPGGGLAAGAQTAARPSPCTNQRSLPHQVPGGWKMRLSTAALLLGLVLVVTGEEDENDPCAYEPLQEEDAGLCKGLDVFYPELGSISCKYVPDCHNYRQKITYLPEPIVKFPGALDGASYILVMVDPDAPSRSDPRSRFWRHWLVTDIKGSDMKKGKIQGQEITGYQPPSPPAHTGFHRYQFFVYLQEGRVISLPRKENKTRGSWKLDRFLSRFHLSEPEASTQFITQNYQDSQGDEAAGGGGQ

SEQ ID NO: 733 - protein, 187 aa, Microtus ochrogaster
MPADISKWAGPLSLQEVDERPQHPLQVTYAGVELDELGQVLTPTQVKNRPSSISWDGLDPAKLYTLVLTDPDAPSRKDPKYREWHHFLVVNMKGNDISSGKVLSDYVGSGPPSGTGLHRYVWLVYEQDKPLKCDEPILSNRSGDHRGKFKVAAFRKKYHLGAPVAGTCYQAEWDDYVPKLYKQLSGK

SEQ ID NO: 734 - protein, 187 aa, Microtus ochrogaster
MPADISQWSGPLSLQEVDERPQHALRVAYAGVEVDELGKVLTPTQVQNRPSSISWDGLDPGKLYTLVLTDPDAPSRKDPKFREWHHFLVVNMKGNDISSGKVLSDYVGSGPPSGTGLHRYVWLVYEQDKPLNCDEPILSNRSGDHRGKFKVAAFRKKYHLGAPVAGTCYQAEWDDYVPKLYEQLSGK

SEQ ID NO: 735 - protein, 187 aa, Miniopterus natalensis
MPVDLSKWSGSLSLQEVEERPQHPLQVKYSGAEIDELGKVLTPTQVKNRPTSITWDGLDPSKLYTLVLTDPDAPSRKDPKYREWHHFLVVNMKGNDISSGTVLSDYVGSGPPKGTGLHRYVWLVYEQDKPLKCDEPILSNRSGDNRGKFKVAAFRKKYQLGSPVAGTCYQAEWDDYVPKLYEQLSGK

SEQ ID NO: 736 - protein, 187 aa, Mustela putorius furo
MPVDLSKWSGPLSLQEVDERPQHPLQVKYTGTEIDELGKVLTPTQVKNRPTSIAWDGLDSGKLYTLVMTDPDAPSRKDPKYREWHHFLVVNMKGNDISSGTVLSDYVGSGPPKGTGLHRYVWLVYEQKGPLKCDEPILSNRSGDHRGKFKVASFRKKYELGPPVAGTCYQAEWDDYVPKLYEQLSGK

SEQ ID NO: 737 - protein, 312 aa, Mustela putorius furo
MLHLSSSLELPGTFSNCLPNGQLLPPLLALQEPPLKLPYSQHWQTLIALRAQTVGHPGGNLLPTLSSPENCQDFSPSCSHHPTAPTVLWVSTDWTMRLAVAALFLGLTMVVSRDVEEGDLCLYEPLSDADAVLCKGLEVFYPELGNIGCMIIPDCNNYRLKITHWAEPIVKFPRALEDANYILVMVDPDAPSRSSPKAQFWRHWLVTDIKGVDIKKGKVQGQELSPYQPPSPPAQSGFHRYQFFVYLQERQNISLHSKENKTRGSWKMDKFLNRFHLSEPEASTQFMTQNYQDSPNYQAPGAGSSELKDKPT

SEQ ID NO: 738 - protein, 217 aa, Mustela putorius furo
MRLAVAALFLGLTMVVSRDVEEGDLCLYEPLSDADAVLCKGLEVFYPELGNIGCMIIPDCNNYRLKITHWAEPIVKFPRALEDANYILVMVDPDAPSRSSPKAQFWRHWLVTDIKGVDIKKGKVQGQELSPYQPPSPPAQSGFHRYQFFVYLQERQNISLHSKENKTRGSWKMDKFLNRFHLSEPEASTQFMTQNYQDSPNYQAPGAGSSELKDKPT

SEQ ID NO: 739 - protein, 187 aa, Myotis lucifugus
MPVDLSQWSGPLSLQEVDESPKHPLQVKYSGAEVDELGKVLTPTQVKNRPTGISWDGLDSSKLYTLVLTDPDAPSRKDPKFREWHHFLVVNMKGNDISSGTVLSDYVGSGPPKGTGLHRYVWLVYEQAKPLKCDEPVLSNRSGDNRGKFKVASFRKKYDLGPPVAGTCYQAEWDDYVPKLYEQLAGK

SEQ ID NO: 740 - protein, 187 aa, Nannospalax galili
MSVDISKWAGPLSLQEVDEPPQHPLRVSYAGVEVDELGKVLTPTQVKNRPSNISWDGLDPGKLYTLVLTDPDAPSRKDPKYREWHHFLVVNMKGNDISSGTILSDYVGSGPPSGTGLHRYVWLVYEQDKPLKCDEPVLSNRSGDHRGKFKVASFRKKYHLGAPVAGTCYQAEWDDYVPKLYEQLSGK

SEQ ID NO: 741 - protein, 187 aa, Neomonachus schauinslandi
MPVDLGKWSGPLSLQEVDERPQHALQVKYTGTEVDELGKVLTPTQVKNRPTSIGWDGLDPGKLYTLVLTDPDAPSRKDPKYREWHHFLVVNMKGNNISSGTVLSDYVGSGPPKGTGLHRYVWLVYEQNGPLKCDEPILSNRSGDHRGKFKVASFRKKYELGPPVAGTCYQAEWDDYVPKLYEQLSGK

SEQ ID NO: 742 - protein, 221 aa, Neomonachus schauinslandi
MHWTMRLAAAALFLSLTLVVTRDMEEGDLCLYEALSDADAVLCKGLEVFYPELGNIGCMFVPDCNNYRQKITHWAEPIVKFPGALEGATYILVMVDPDAPSRSSPKAQFWRHWLVTDIKGADIKKGKVQGQELSPYQPPSPPAKSGFHRYQFFVYLQERQNISLHSKENKTRGSWKMDRFLNRFHLSEPEASTQFMTQNYQDSPNYQTPGAGNSEPKDKPK

SEQ ID NO: 743 - protein, 187 aa, Neophocaena asiaeorientalis asiaeorientalis
MPVDLSKWSGPLSLQEVDERPQHPLQVNYGGAEVDELGKVLTPTQVKNRPTSIAWDGLDPGKLYTLVLTDPDAPSRKDPKYREWHHFLVVNMKGNDVSSGTVLSDYVGSGPPKGTGLHRYVWLVYEQDRPLKCDEPILSNRSGDHRGKFKVANFRKKYELGAPVAGTCYQAEWDDYVPKLYEQLSGK

SEQ ID NO: 744 - protein, 218 aa, Neophocaena asiaeorientalis asiaeorientalis
MRLAVAALLLGLTMVATGDEGDKDPCVYEALTDNDAVLCKGLKVFYPELGNLGCMVVPECNNYRQKITYWTEPIVKFPGALDGATYILVMVDPDAPSRSSPKARFWRHWLVTDIKGADVKKGKIQGQELSPYQPPSPPAQSGFHRYQFFVYLQEGKTISLLPKENKTRGSWNMDRFLSRFHLGEPEASTQFVTQNYQDTLHHQAPGGSSEPKDKPEPR

SEQ ID NO: 745 - protein, 223 aa, Nomascus leucogenys
MGWTMRLVTAALLLDLMMVVTGDEDENSLCAHEALLDEDALFCQGLEVFYPELGNIGCKVVPDCNNYRQKITSWMEPIVKFPGAVDGATYILVMVDPDAPSRAEPRQRFWRHWLVTDIKGRRLKKGKIQGQELSAYQAPSPPAHSGFRRYQFFVYLQEGKVISLLPKENKTRGSWKVDRFLNRFHLGEPEASTQFMTQNYQDSPTLQAPRGGASKPKHKTRQR

SEQ ID NO: 746 - protein, 187 aa, Ochotona princeps
MPVDLSKWSGPLSLQEVEERPQHPLQVTYGGVVVDELGKVLTPTQVKNRPTSIAWDGLDPGKLYTLVLTDPDAPSRKDPKYREWHHFLVVNMKGNDISSGTVLSDYVGSGPPKGTGLHRYVWLVYEQDGPLKCDEPILSNRSGDNRGKFKVASFRKKYQLGTPVAGSCYQAEWDDYVPKLYEQLSGK

SEQ ID NO: 747 - protein, 187 aa, Ochotona princeps
MPVDLSKWSGPLSLQEVEERPQHPLQVTYGGVVVDELGKVLTPTQVKNRPTSIAWDGLDPGKLYTLVLTDPDAPSRKDPKYRQWHHFLVVNMKGNDISSGTVLSDYVGSGPPKGTGLHRYVWLVYEQDGPLKCDEPILSNRSGDNRGKFKVASFRKKYQLGTPVAGSCYQAEWDDYVPKLYEQLSGK

SEQ ID NO: 748 - protein, 223 aa, Ochotona princeps
MGWAMRLATAVLLLGVVMVAAGGEEESDPCVYEALPDEDAVLCKGLGVFYPELGNIGCMFIPDCDNFRQKITTWTEPIVKFPGALDGASYILVMVDPDAPSRSEPRSRFWRHWLVVDIKGADLRKGKIQGQELTAYQPPSPPAHSGFHRYQFFVYLQEGRVISLLPKENKTRASWKMDSFLNRYRLNEPEASTQFMTQNYQDSPRFQASGNGNDNDKAKSQHN

SEQ ID NO: 749 - protein, 255 aa, Octodon degus
MILLSSEESQAHSPAKAAALCPGSPDPGAGHRAALWAPFQVPINWNMRLAVAALWLGLLMVAAEGEEDDSCVYEALPDEDTALCKRLEVFYPVLGNVGCMFIPDCNNYRWKITHWDKPIVKFSGAVDDEKYILVMVDPDAPSRYNPRARFWRHWLVTDIQGTDLQRGKIKGKELSAYQPPSPPAHSGFHRYQFYIYLQKGKTISLLPKENKTRGSWEMDKFLNRFHLNEPEASTQFMMLNYQDSATLQASKEGGR

SEQ ID NO: 750 - protein, 187 aa, Odobenus rosmarus divergens
MPVDLSKWSGPLSLQEVDERPQHALQVKYTGTEVDELGKVLTPTQVKNRPTSIGWDGLDPGKLYTLVLTDPDAPSRKDPKYREWHHFLVVNMKGNDISSGTVLSDYVGSGPPKGTGLHRYVWLVYEQSGPLKCDEPILSNRSGDHRGKFKVASFRKKYELGPPVAGTCYQAEWDDYVPKLYEQLSGK

SEQ ID NO: 751 - protein, 323 aa, Odobenus rosmarus divergens
  misc_feature (71)..(71): Xaa can be any naturally occurring amino acid
  misc_feature (102)..(102): Xaa can be any naturally occurring amino acid
MPEDPPILFLFSPTLQVSSSLELPGTFPNCLPNGQLLPPLLALQEPPLKLPYSQHWQTLIALRAQTVGHPXGNFLLILSSPETCQDFSPPCSHRPTVPTLLXVSMHWTMRLAAAALFLSLTMVVTRDVEDLCLYEALSDADAVLCKGLEVFYPELGNIGCMFVPDCNNYRQKITHWAEPLVKFPGALEGTTYILVMVDPDAPSRSSPKAQFWRHWLVTDIKGADIKKGKVQGQELSPYQPPSPPVKSGFHRYQFFVYLQEKQNISLHSKENKTRGSWKMDKFLNRFHLSEPEASTQFMTQNYQDSPNYQTTGAGNSEPKDKPK

SEQ ID NO: 752 - protein, 229 aa, Odocoileus virginianus texanus
MYSSAVRLELLPYSVQTAVSQCSDPARVHKPLSLLSDPLGSTMPVDLGKWSGPLSLQEVDERPQHPLQVKYGGAEVDELGKVLTPTQVKNRPTSVTWDGLDPGKLYTLVLTDPDAPSRKDPKYREWHHFLVVNMKGNDIGSGTVLSDYVGSGPPKGTGLHRYVWLVYEQKGPLKCDEPILSNRSGDHRGKFKVASFHKKYELGTPVAGTCYQAEWDDYVPKLYEQLSGK

SEQ ID NO: 753 - protein, 223 aa, Odocoileus virginianus texanus
MGWTMRLATAALLLGLAAVVTGEEEENDLCIYEALPDNDAVLCKGLKIFYPELGNIGCMIVPECNNYRQKITTWPEPIVKFPQALEDAAYILVMVDPDAPSRSSPKARFWRHWLVSDIKGTDMKIGKIQGQELSPYQPPSPPAHSGLHRYQFFVYLQEGRTISLSPKENKTRGSWKMDKFLSHFHLSEPEASTQFMTQYYLDALSRQNPGVVSNETTDKPEPK

SEQ ID NO: 754 - protein, 187 aa, Orcinus orca
MPVDLSKWSGPLSLQEVDERPQHPLQVKYGGAEVDELGKVLTPTQVKNRPTSIAWDGLDPGKLYTLVLTDPDAPSRKDPKYREWHHFLVVNMKGNDISSGTVLSDYVGSGPPKGTGLHRYVWLVYEQDRPLKCDEPILSNRSGDHRGKFKVANFRKKYELGAPVAGTCYQAEWDNYVPKLYEQLSGK

SEQ ID NO: 755 - protein, 262 aa, Orcinus orca
MLGHPGGSLLPTFSSPETCQDCSLPCSHHHPTAPTLLRVPKSWTMRLAVAALLLGLTMMATGDEGDKDPCVYEALPDNDAVLCKGLQVFYPELGNLGCMVVPECNNYRQKITYWTEPIVKFPGALDGAAYILVMVDPDAPSRSSPKARFWRHWLVTDIKGADMKKGKIQGQELSPYQPPSPPAQSGFHRYQFFVYLQEGKTISLLPKENKTRGSWNMDRFLSRFHLGEPEASTQFMTQNYQDTLHHQAPGGSSEPKDKPEPR

SEQ ID NO: 756 - protein, 187 aa, Orycteropus afer afer
MPADLSKWTGPLSLQEVDEQPQHSLQVKYGGVEIDELGKVLTPTQVKNRPTSITWDGLDSGKLYTLVLTDPDAPSRKDPKYREWHHFLVVNMKGNDISSGTVLSDYVGSGPPKGTGLHRYVWLVYEQDRPLKCDEPILSNRSGDHRGKFKVASFRKKYELRSPIAGTCYQAEWDDYVPKLYEQLSGK

SEQ ID NO: 757 - protein, 223 aa, Orycteropus afer afer
MSSTMKLATSVLLLGLIMVVTGGEEENDPCVYEALSNNDALLCKGLEVLYPELGNIGCMYVPDCSNYRQKITHWSEPIVKFHGALEDATYILIMVDPDAPSRSSPTARFWRHWLVTDISGTDMKKGKIQGQELTSYQPPSPPAHTGFHRYQFFVYLQEGKTISLLPKENKTRGSWNVDKFLNRFHLNEPEASTQFLTQNYQDSSGLQSPGGSENEPKNKPKQR

SEQ ID NO: 758 - protein, 187 aa, Oryctolagus cuniculus
MPVDLSKWSGPLSLQEVEERPQHPLQVTYSGVALDELGQVLTPTQVKNRPTSIVWDGLDPDKLYTLVLTDPDAPSRKDPKYREWHHFLVVNMKGGNISSGTVLSDYVGSGPPKGTGLHRYVWLVYEQDGPLKCDEPVLSNRSGDHRGKFKVANFRKKYHLGTPVAGSCYQAEWDDYVPKLYELLSGK

SEQ ID NO: 759 - protein, 187 aa, Otolemur garnettii
MPVDISKWSGPLSLQEVDERPQHSMQVAYSGAVVDELGKVLTPTQVKNRPTSITWDGLDPSKLYTLVLTDPDAPSRKDPKYREWHHFLVVNMKGNDISSGTVLSDYVGSGPPKGTGLHRYVWLVYEQDKPLKCDEPVLSNRSGDNRGKFKVASFRKKYHLGAPVAGTCYQAEWDDYVPKLYEQLSGK

SEQ ID NO: 760 - protein, 221 aa, Otolemur garnettii
MGWTMRLVTAALLLGLVTMMTGNEDENDPCIYETLSDEDAVLCKGLEVYYPEVGNIACAFIPDCNNFRQKITHWHEPIVKFPGALDGATYILVMVDPDAPSRSEPTKKFWRHWLVSDIKGLDMKKGKIQGQELSYYQPPSPPPKTGFHRYQFFVYLQEGRVISLLHKENKTRGYWKMDKFLNRFHLKEPEASTQFMTQNQQDSPRLQNTGGGDSESKNKPK

SEQ ID NO: 761 - protein, 187 aa, Ovis aries
MPVDLSKWSGPLSLQEVDERPQHPLQVKYGGAEVDELGKVLTPTQVKNRPTSITWDGLDPGKLYTLVLTDPDAPSRKDPKYREWHHFLVVNMKGNNISSGTVLSDYVGSGPPKGTGLHRYVWLVYEQEGPLKCDEPILSNRSGDHRGKFKVASFRKKYELGTPVAGTCYQAEWDDYVPKLYEQLSGK

SEQ ID NO: 762 - protein, 223 aa, Ovis aries
MGWTMRLATAALLLGLAVAVTGEEEDNDVCVYEALPDNDAVLCKGLKVFYPELGNIGCMIVPECNNYRQKITTWPEPIVKFPQALEDAAYILVMVDPDAPSRSSPKARFWRHWLVSDIKGTDMKIGKIQGQELSPYQPPSPPAHSGLHRYQFFVYLQEGRTISLPPKENKTRGSWKMDKFLSHFHLTEPEASTQFMTQYYLDALSPQNPGVVSNATTDKPEPK

SEQ ID NO: 763 - protein, 184 aa, Ovis aries musimon
  misc_feature (26)..(26): Xaa can be any naturally occurring amino acid
MPVDLSKWSGPLSLQEVDERPQHPLXSGTEVDELGKVLTPTQVKNRPTSITWDGLDPGKLYTLVLTDPDAPSRKDPKYREWHHFLVVNMKGNNISSGTVLSDYVGSGPPKGTGLHRYVWLVYEQEGPLKCDEPILSNRSGDHRGKFKVASFRKKYELGTPVAGTCYQAEWDDYVPKLYEQLSGK

SEQ ID NO: 764 - protein, 223 aa, Pan paniscus
MGWTMRLVTAALLLGLMMVVTGDKDENSPCAHETLLDEDTLFCQGLEVFYPELGNIGCKVVPDCNNYRQKITSWMEPIVKFPGAVDGATYILVMVDPDAPSRAEPRQRFWRHWLVTDIKGADLKKGKIQGQELSAYQAPSPPAHSGFHRYQFFVYLQEGKVISLLPKENETRSSWRMDRFLNRFHLGEPEASTQFMTQNYQDSPTLQAPRGRASEPKHKTRRR

SEQ ID NO: 765 - protein, 333 aa, Pan troglodytes
MQQIKKTKTQPRRIQLHFFFPATLSETRTSLLGEPIPGRPSFSFLETTALQAEPLFPRTRQPQGAGCMDPGARAARLCQLRPIRGQGAVGVAWGGARAGRWLRRVLSRGRGVCVFPSQCAELSVSPLPPAPGLPRHSRLHALLGLAMPVDLSKWSGPLSLQEVDEQPQHPLHVTYAGAAVDELGKVLTPTQVKNRPTSISWDGLDSGKLYTLVLTDPDAPSRKDPKYREWHHFLVVNMKGNDISSGTVLSDYVGSGPPKGTGLHRYVWLVYEQDRPLKCDEPILSNRSGDHRGKFKVASFRKKYELRAPVAGTCYQAEWDDYVPKLYEQLSGK

SEQ ID NO: 766 - protein, 223 aa, Pan troglodytes
MGWTMTLVTAALLLGLMMVVTGDKDENSPCAHEALLDEDTLFCQGLEVFYPELGNIGCKVVPDCNNYRQKITSWMEPIVKFPGAVDGATYILVMVDPDAPSRAEPRQRFWRHWLVTDIKGADLKKGKIQGQELSAYQAPSPPAHSGFHRYQFFVYLQEGKVISLLPKENKTRGSWRMDRFLNRFHLGEPEASTQFMTQNYQDSPTLQAPRGRASEPKHKTRRR

SEQ ID NO: 767 - protein, 187 aa, Panthera pardus
MPVDLSKWSGPLSLQEVDERPQHPLQVKYTGAEVDELGKVLTPTQVKNRPTSIAWDGLDPGKLYTLVMTDPDAPSRKDPKYREWHHFLVVNMKGNDISSGTVLSDYIGSGPPKGTGLHRYVWLVYEQNGPLKCDEPILSNRSGDNRGKFKVASFRKKYELGPPVAGTCYQAEWDDYVPKLYEQLSGK

SEQ ID NO: 768 - protein, 223 aa, Panthera pardus
MGWTMKLATAALFLGLTMVVPGDEEDGDMCMYEALSDTDAVLCKGLEVFYPELGNIGCMFVPDCNNYRQKITHWDEPIVKFPGALEGATYILVMVDPDAPSRSSPKAQFWRHWLVTDIKGVDMKKGKIQGQELSAYQPPSPPAQSGFHRYQFFVYLQEGQNISLHSKENKTRGNWKMDKFLNRFHLSEPEASTQFMTENYQDSPNYQPPAGGSSEPTDKPKQS

SEQ ID NO: 769 - protein, 223 aa, Panthera tigris altaica
MGWTMKLATAALFLGLTMVVPGDEEDGDMCMYEALSDTDAVLCKGLEVFYPELGNIGCMFVPDCNNYRQKITHWDEPIVKFPGALEGATYILVMVDPDAPSRSSPKAQFWRHWLVTDIKGVDMKKGKIQGQELSAYQPPSPPAQSGFHRYQFFVYLQEGQNISLHSKENKTRGNWKMHKFLTRFHLSEPEASTQFMTENYQDSPNYQPPAGGSSEPTDKPKQS

SEQ ID NO: 770 - protein, 223 aa, Pantholops hodgsonii
MGWTMRLATAALLLGLAVAVTGEEEDNDVCVYEALPDNDAVLCKGLKVFYPELGNIGCMIVPECNNYRQKITTWPEPIVKFPQALEDAAYILVMVDPDAPSRSSPKARFWRHWLVSDIKGTDMKIGKIQGQELSPYQPPSPPAHSGLHRYQFFVYLQEGRTISLPPKENKTRGSWKMDKFLSHFHLTEPEASTQFMTQYYLDTLSPQNPGVVSNATTDKPEPK

SEQ ID NO: 771 - protein, 187 aa, Papio anubis
MPVDLSKWSGPLSLQEVDEQPQHPLHVTYAGAALDELGKVLTPTQVKNRPTSISWDGLDSGKLYTLVLTDPDAPSRKDPKYREWQHFLVVNMKGNDISSGTVLSDYVGSGPPKGTGLHRYVWLVYEQARPLKCDEPILSNRSGDHRGKFKVASFRKKYELGAPVAGACYQAEWDNYVPKLYEQLSGK

SEQ ID NO: 772 - protein, 223 aa, Papio anubis
MGWTVRLVTAALLLGLVMVITGDEDENNPCAQEALLDEDALVCQGLEVFYPELGNIGCKVVPDCNNYRQKITSWMAPIVKFPGAVEGATYILLMVDPDAPSRAEPTQKFWRHWLVTDIEGADLKKGKIQGQELSAYQAPSPPAHSGFHRYQFFVYLQEGKVISLLPKENKTRGSWKMGIFLNRFHLGEPEASTQFMTQNYQDSPTLQAPRGGASKPKHKTRWR

SEQ ID NO: 773 - protein, 187 aa, Peromyscus maniculatus bairdii
MPVDISKWAGPLSLQEVDERPQHPLRVTYGGVEVDELGQVLTPTQVKNRPSSISWDGLDPGKLYTLVLTDPDAPSRRDPKYREWHHFLVVNMKGNDISSGKVLSDYVGSGPPSGTGLHRYVWLVYKQDKPLKCDEPVLSNRSGDHRGKFKVAAFRKKYHLGAPVAGTCYQAEWDDYVPKLHKQLSGK

SEQ ID NO: 774 - protein, 208 aa, Peromyscus maniculatus bairdii
MGSRHSGLSACVLAVVAVAVAMPADISQWSGPLSLQEVDERPQHALRVAYAGVEVDELGKVLTPTQVKNRPSSISWDGLDPGKLYTLVLTDPDAPSRKDPKFREWHHFLVVNMKGNDISSGKVLSDYVGSGPPSGTGLHRYVWLVYEQDKPLNCDEPILSNRSGDHRGKFKVAAFRKKYHLGAPVAGTCYQAEWDDYVPKLYEQLSGK

SEQ ID NO: 775 - protein, 187 aa, Physeter catodon
MPVDLSKWSGPLSLQEVDERPQHPLQVKYGGAEVDELGKVLTPTQVQNRPTSIAWDGLDPGKLYTLVLTDPDAPSRKDPKYREWHHFLVVNMKGNDISSGTVLSDYVGSGPPKGTGLHRYIWLVYEQDRPLKCDEPILSNRSGDHRGKFKVANFRRKYELGAPVAGTCYQAEWDDYVPKLYEQLSGK

SEQ ID NO: 776 - protein, 231 aa, Physeter catodon
  misc_feature (117)..(117): Xaa can be any naturally occurring amino acid
  misc_feature (159)..(159): Xaa can be any naturally occurring amino acid
MIRNRSGAQERDHRRLAAAALPLGLTMAATGDEGDNGPCVYEALPDNDAVLCKGLKVFYPELGNLSCMVVPECHNYRQKITYWTEPIVKFPGALDGATYILVMVDPDAPSRSSPIAXFWRHWLVTDIQGADMKKGKIQGQELSPYQPPSPPAQSGFHRXQFFVCLQEGKTISLLPKENKTRGSWKMDRFLSCFHLGEPEASIQFMTQNYQDTLNHQAPGGSSEPKDKPELR

SEQ ID NO: 777 - protein, 274 aa, Piliocolobus tephrosceles
MYPGALAALLCQLRPIRGQAAVGVAWGGTRGGRWLGRVLSLSRWVCAFPGQCAESSVSPLPPAPGLPLPPAPSLPRHSRLHALLGLAMPVDLSKWSGPLSLQEVDEQPQHPLHVTYAGAALDELGKVLTPTQVKNRPTSISWDGVDSGKLYTLVLTDPDAPSRKDPKYREWHHFLVVNMKGNDISSGTVLSDYVGSGPPKGTGLHRYVWLVYEQARPLKCDEPILSNRSGDHRGKFKVASFRKKYELGAPVAGACYQAEWDDYVPKLYEQLSGK

SEQ ID NO: 778 - protein, 223 aa, Piliocolobus tephrosceles
MGWTMRLVTAALLLGLVMVITGDEDENNPCAQEALLDEDALVCQGLEVFYPELGNIGCKVVPDCNNYRQKITSWREPIVKFPGAMEGATYILVMVDPDAPSRAEPTQKFWRHWLVTDIEGADLKKGKIQGQELSAYQAPSPPAHSGFHRYQFFVYLQEGKVISLLPKENKTRGSWKMDIFLNRFHLGEPEASTQFMTQNYQDSPTLQAPRGGASKPKHKTRWR

SEQ ID NO: 779 - protein, 187 aa, Pongo abelii
MPVDLSKWSGPLSLQEVDERPQHPLHVTYAGAAVDELGKVLTPTQVKNRPTSISWEGLDSGKLYTLVLTDPDAPSRKDPKYREWHHFLVVNMKGNDISSGTVLSDYVGSGPPKGTGLHRYVWLVYEQDRPLKCDEPILSNRSGDHRGKFKVASFRKKYELRAPVAGTCYQAEWDDYVPKLYEQLSGK

SEQ ID NO: 780 - protein, 223 aa, Pongo abelii
MGWTMRLVTAALLLGLMMVVTGDEDENSPCAHEALLDEDTLFCQGLEVFYPELGSIGCKVVPDCNNYRQKITSWMEPIVKFPGAVDGATYILVMVDPDAPSRAEPRQRFWRHWLVTDIEGADLKKGKIQGQELSAYQAPSPPAHSGFHRYQFFVFLQEGKVISLLPKENKTRGSWKMDRFLNRFHLGEPEASTQFMTQNYQDSPTLQAPRGGASEPKHKTRRR

SEQ ID NO: 781 - protein, 187 aa, Propithecus coquereli
MPVDLSKWSGPLSLQEVDERPQHPLQVTYSGAAVDELGKVLTPTQVQNRPTSITWDGLDPGKLYTLVLTDPDAPSRKDPKYREWHHFLVVNMKGNNISSGTVLSDYVGSGPPKGTGLHRYVWLVYEQDRPLKCDEPVLSNRSGDHRGKFKVASFRKKYELGAPVAGTCYQAEWDDYVPKLYEQLSGK

SEQ ID NO: 782 - protein, 225 aa, Propithecus coquereli
MGWKMRLPTAALLLGLVLVVTGDEEENGPCAYEPLPEEDAVLCKGLEIVYPEVGSIGCKYVPDCNNYRQKITYWPDPIVKFPGALDGASYILVMVDPDAPSRSEPRMKYWRHWLVTDIKGSDMKRGRIQGQELTGYQPPSPPAHTGFHRYQFFIYLQEGRVLSLPRKENKTRGSWKMDDFLKRFHLSEPEASTQFMTQNYEDSLPGSPQAPRGGNCKSKNLRKQR

SEQ ID NO: 783 - protein, 185 aa, Pteropus alecto
MDLSKWSGPLSLQEVDERPQQPLQVKYSGVEIDELGKVLTPTQVKNRPTSIVWDGLDSGKLYTLVLTDPDAPSRKDPKFREWHHFLVVNMKGNNISSGTVLSDYVGSGPPKGTGLHRYVWLVYEQNGPLKCDEPILSNRSGDHCGKFKVASFRKKYELGPPVAGTCYQAEWDDYVPKLYEQLSGK

SEQ ID NO: 784 - protein, 222 aa, Pteropus alecto
MGWTMRLVMAPLFLGLTMVVTGNLEDNDSCVYEALSDTDAVLCKGLEVFYPELGNIGCMYIPDCNDYRQKITRWSQPTVKFSGALEDATYILVMVDPDAPSKSFPKARFWRHWLVTNIKGTDMKKGKIKGQELSSYQPPSPPAQSGFHRYQFFVYLQERKNISLLHKENKTRASWKMDRFLNRLRLREPEASTQFMTQNYQDSPDFQDPGRESSKPKSRLKQ

SEQ ID NO: 785 - protein, 185 aa, Pteropus vampyrus
MDLSKWSGPLSLQEVDERPQQPLQVKYSGVEIDELGKVLTPTQVKNRPASIVWDGLDSGKLYTLVLTDPDAPSRKDPKFREWHHFLVVNMKGNNISSGTVLSDYVGSGPPKGTGLHRYVWLVYEQNGPLKCDEPILSNRSGDHRGKFKVASFRKKYELGPPVAGTCYQAEWDDYVPKLYEQLSGK

SEQ ID NO: 786 - protein, 222 aa, Pteropus vampyrus
MGWTMRLVMAPLFLGLTMVVTGNLEDNDSCVYEALSDTDAVLCKGLEVFYPELGNIGCMYIPDCNDYRQKITRWSQPTVKFSGALEDATYILVMVDPDAPSKSFPKARFWRHWLVTNIKGTDMKKGKIKGQELSSYQPPSPPAQSGFHRYQFFVYLQERKNISLLHKENKTRGSWKMDRFLNRFRLREPEASTQFMTQNYQDSPDFQDPGRESNKPKSRLKQ

SEQ ID NO: 787 - protein, 223 aa, Puma concolor
MGWTMKLATAALFLGLTMVVPRDEEDGDMCMYEALSDTDAVLCKGLEVFYPELGNIGCMFVPDCNNYRQKITHWDEPIVKFPGALEGATYILVMVDPDAPSRSSPKAQFWRHWLVTDIKGVDMKKGKIQGQELSAYQPPSPPAQSGFHRYQFFVYLQEGQNISLHSKENETRGNWKMDKFLNRFHLSEPEASTQFMTENYQDSPNYQPPAGGSSEPTDKPKQS

SEQ ID NO: 788 - protein, 187 aa, Rattus norvegicus
MAADISQWAGPLSLQEVDEPPQHALRVDYGGVTVDELGKVLTPTQVMNRPSSISWDGLDPGKLYTLVLTDPDAPSRKDPKFREWHHFLVVNMKGNDISSGTVLSEYVGSGPPKDTGLHRYVWLVYEQEQPLNCDEPILSNKSGDNRGKFKVESFRKKYHLGAPVAGTCFQAEWDDSVPKLHDQLAGK

SEQ ID NO: 789 - protein, 187 aa, Rattus norvegicus
MPADITVWAGPLSLQDVDEQPQHLLRVTYAGAEVSELGQVLTPTQVKNRPSSITWDGLDPGKLYTLILTDPDAPSRKEPIYREWHHFLVVNMKGNDISSGKVLSDYVGSGPPKGTGLHRYVWLVYQQDKPLKCDEPILTNRSGNQRGKFKAAAFRKKYHLGAPVAGTCYQAEWDSYVPKLYKQLSGK

SEQ ID NO: 790 - protein, 256 aa, Rhinolophus sinicus
MTREREAPRATRFDQSVSRGARAVAPARALLLLVGLCCLGPVCGLLAVCAADLGLVSPALPAVLPFGPAKPMDLSKWSGPLSLQEVDEQPQHPLQVKYAGAEIDELGKVLTPTQVKNRPTSITWDGLDAGKLYTLVLTDPDAPSRKDPKYREWHHFLVVNMKGNDISSGTVLSDYVGSGPPKGTGLHRYVWLVYEQDKPLKCDEPILSNRSGDHRGKFKVAAFRKKYALGTPVAGTCYQAEWDDYVPKLYEQLSGK

SEQ ID NO: 791 - protein, 372 aa, Rhinolophus sinicus
MSTEPGAGLLDQEGWCQCKGSHHDLNHTEGQTEKWVSYEGLLERSTPSDCLTVYLERWEKSSSLELSGTFSNCLPQRPTATTSSPATPGTFPDTLAPLILPDPDCCTGPNCWGKLEKLDPLTFSSPETCQDFSLPCCLHPTAPTLLRVRIGWTMRLATAALILSLTVMVTTDEEENDRCVYEALTDTDAVICKGLEVFYPELGNIGCMFVPDCNNYRLKITHWPAPTVKFPRALEDATYILVMVDPDAPSRSNPQAQFWRHWLVTDIKGIDLKKGKILGRELSAYQPPKPPSQTGFHRYQFFVYLQGGKSISLLPEENRTRASWKMDRFLNRYDLNEPEASTQFMTENYQDSPNFQAPGGRSSEPKERPKQK

SEQ ID NO: 792 - protein, 187 aa, Rhinopithecus bieti
MPVDVSKWSGPLSLQEVDEQPQHPLHVTYAGAALDELGKVLTPTQVKNRPTSISWDGVDSGKLYTLVLTDPDAPSRKDPKYREWHHFLVVNMKGNDISSGTVLSDYVGSGPPKGTGLHRYVWLVYEQARPLKCDEPILSNRSGDHRGKFKVASFRKKYELGAPVAGSCYQAEWDDYVPKLYEQLSGK

SEQ ID NO: 793 - protein, 223 aa, Rhinopithecus bieti
MSWTMRLVTAALLLGLVMVITGDEDENNPCAQEALLDEDALVCQGLEVFYPELGNIGCKVVPDCNNYRQKITSWREPIVKFPGAVEGATYILVMVDPDAPSRAEPTQKFWRHWLVTDIEGADLKKGKIQGQELSAYQAPSPPPHSGFHHYQFFVYLQEGKVISLLPKENKTRGSWKMDIFLNRFHLGEPEASTQFMTQNYQDSPTLQAPRGGASKPKHKTRWR

SEQ ID NO: 794 - protein, 187 aa, Rhinopithecus roxellana
MPVDVSKWSGPLSLQEVDEQPQHPLHVTYAGAVLDELGKVLTPTQVKNRPTSISWDGVDSGKLYTLVLTDPDAPSRKDPKYREWHHFLVVNMKGNDISSGTVLSDYVGSGPPKGTGLHRYVWLVYEQARPLKCDEPILSNRSGDHRGKFKVASFRKKYELGAPVAGSCYQAEWDDYVPKLYEQLSGK

SEQ ID NO: 795 - protein, 223 aa, Rhinopithecus roxellana
MGWTMRLVTAALLLGLVMVITGDEDENNPCAQEALLDEDALVCQGLEVFYPELGNIGCKVVPDCNNYRQKITSWREPIVKFPGAVEGATYILVMVDPDAPSRAEPTQKFWRHWLVTDIEGADLKKGKIQGQELSAYQAPSPPPHSGFHRYQFFVYLQEGKVISLLPKENKTRGSWKMDIFLNRFHLGEPEASTQFMTQNYQDSPTLQAPRGGASKPKHKTRWR

SEQ ID NO: 796 - protein, 185 aa, Rousettus aegyptiacus
MDLSKWSGPLSLQEVDERPQQPLHVKYSGVEIDELGKVLTPTQVKNRPTSIVWDGVDSGKLYTLVLTDPDAPSRKDPKFREWHHFLVVNMKGNNISSGTVLSDYVGSGPPKGTGLHRYVWLVYEQNGPLKCDEPILSNRSGDHRGKFKVASFRKKYELGPPVAGTCYQAEWDDYVPKLYEQLSGK

SEQ ID NO: 797 - protein, 225 aa, Rousettus aegyptiacus
MVTMGWTMRLVMAPLLLGLTVVITGNLEDDSCVYEALSDTDAVLCKGLEVFYPELGNIGCMYIPDCNDYRQKITYWPQPKVKFPGAVEDATYILVMVDPDAPSKSFPKARFWRHWLVTDVKGTDMKKGKIQGQELSSYQPPSPPARTGFHRYQFFVYLQERKNISLLRKENMTRASWKMDGFLNRFHLREPEASTQFMTQNYQDSPDVQDRGRESSSPKNRLKQR

SEQ ID NO: 798 - protein, 222 aa, Rousettus aegyptiacus
MGWTMRLVMAPLLLGLTVVITGNLEDDSCVYEALSDTDAVLCKGLEVFYPELGNIGCMYIPDCNDYRQKITYWPQPKVKFPGAVEDATYILVMVDPDAPSKSFPKARFWRHWLVTDVKGTDMKKGKIQGQELSSYQPPSPPARTGFHRYQFFVYLQERKNISLLRKENMTRASWKMDGFLNRFHLREPEASTQFMTQNYQDSPDVQDRGRESSSPKNRLKQR

SEQ ID NO: 799 - protein, 219 aa, Saimiri boliviensis boliviensis
MRLATAALLLGVVVVLTGDENKNDLCAHRALLDEDTVLCQGLEVFYPELGSIGCMIVPDCNDYRQKITSWTEPRVKFPQAVDGATYVLVMVDPDAPSRAEPRQRFWRHWLVADIKGADLKKGKIQGQELSAYQPPSPPAHSGFHRYQFFVYLQEGKVISLLPKENKTRGSWKMDRFLNRFHLGEPEASTQFMTQNYQDSTTLQAPRGGASEPKHKRKRR

SEQ ID NO: 800 - protein, 187 aa, Sus scrofa
MPVDLGKWSGPLSLQEVDERPQHPLQVKYGGAEVDELGKVLTPTQVKSRPTSITWDGLNPDKLYTLVLTDPDAPSRKDPKYREWHHFLVVNMKGNDISSGTVLSDYVGSGPPKGTGLHRYVWLVYEQDGPLKCDEPILSNRSGDHRGKFKVASFRKKYQLGAPVAGTCYQAEWDDYVPKLYEQLSGK

SEQ ID NO: 801 - protein, 222 aa, Sus scrofa
MGWTMRLATAALFLGLTMAVPGDEEDSDPCVYEALSDSDAVLCKGLKVFYPELGNLGCMVVPECNNYRQKITSWTEPIVKFPGALDGATYILVMVDPDAPSRSSPKAQFWRHWLVTDIKGTDIRKGKIQGQELSPYQPPSPPPKSGFHRYQFFVYLQQEKSISLLPKENKTRGSWKMDKFLSRFHLSEPEASTQFMTQYYQDSQKLQPGEGSSEPKDKPKRR

SEQ ID NO: 802 - protein, 233 aa, Sus scrofa
MPAPRKPCKVPMGWTMRLATAALFLGLTMAVPGDEEDSDPCVYEALSDSDAVLCKGLKVFYPELGNLGCMVVPECNNYRQKITSWTEPIVKFPGALDGATYILVMVDPDAPSRSSPKAQFWRHWLVTDIKGTDIRKGKIQGQELSPYQPPSPPPKSGFHRYQFFVYLQQEKSISLLPKENKTRGSWKMDKFLSRFHLSEPEASTQFMTQYYQDSQKLQPGEGSSEPKDKPKRR

SEQ ID NO: 803 - protein, 187 aa, Theropithecus gelada
MPVDLSKWSGPLSLQEVDEQPQHPLHVTYAGAALDELGKVLTPTQVKNRPTSISWDGLDSGKLYTLVLTDPDAPSRKDPKYREWQHFLVVNMKGNDISSGTVLSDYVGSGPPKGTGLHRYVWLVYEQARPLKCDEPILSNRSGDHRGKFKVASFRKKYELGPPVAGACYQAEWDDYVPKLYEQLSGK

SEQ ID NO: 804 - protein, 187 aa, Trichechus manatus latirostris
MPVDLSKWSGPLSLQEVDERPQHPLQVKYAGADIDELGKVLTPTQVKNRPTSIIWDGLDSGKLYTLVLTDPDAPSRKDPKYREWHHFLVVNMKGNDISSGTVLSDYVGSGPPKGTGLHRYVWLVYEQDRPLKCDEPILSNRSGDNRGKFKVASFRKKYKLGSPVAGTCYQAEWDNYVPKLYEQLSGK

SEQ ID NO: 805 - protein, 222 aa, Trichechus manatus latirostris
MSSTMRLATAVLLLGLIMVVTGGEEENDPCVYEAISNDDALLCKGLEVLYPELGNIGCMYVPDCSNYRQKITHWPEPIVKFHGALEDATYILIMVDPDAPSRSSPTARFWRHWLVTDISGTDMKKGKIQGQELSSYQPPSPPTHTGFHRYQFFVYLQEGKTISLLSKENKTRGSWDMDKFLNRFHLNEPEASTQFLTQNYQDSSGLQSPGGGENEPKDKPKQ

SEQ ID NO: 806 - protein, 187 aa, Tupaia chinensis
MPVDLSKWSGPLSLQEVDERPQHPLQVTYAGAEVDELGKVLTPTQVKNRPTSIAWDGLDSGKLYTLVLTDPDAPSRKDPKYREWHHFLVVNMKGNDISSGTVLSDYVGSGPPKGTGLHRYVWLVYEQARPLKCDEPILSNRSGDHRGKFKVASFRKKYELGPPVAGTCYQAEWDDYVPKLYEQLSGK

SEQ ID NO: 807 - protein, 192 aa, Tupaia chinensis
MPVDLSKWSGPLSLQEVDERPQHPLQVTYAGAEVDELGKVLTPTQVKNRPTSIAWDGLDSGKLYTLVLTDPDAPSRKDPKYRQVGIKEWHHFLVVNMKGNDISSGTVLSDYVGSGPPKGTGLHRYVWLVYEQARPLKCDEPILSNRSGDHRGKFKVASFRKKYELGPPVAGTCYQAEWDDYVPKLYEQLSGK

SEQ ID NO: 808 - protein, 235 aa, Tupaia chinensis
MKVFGQEMYQEPVGWTMRLAAAILWLGLLMVVTGDVEENDLCEYEALMDEDVVLCRGLEVLYPELGNVGCMFIPDCNNFRQKITSWTEPIVKFPGALEGATYILVMVDPDAPSRSEPKARFWRHWLVTDIKGADLKKGKIQGQELSASQAPPPPAHSGFHRYQFFVYLQEGKVISLLPKENKTRGSWKMDSFLSRFHLSEPEASTQFMTRNYQDSPAPRDHRGSRRKSTFRPKHR

SEQ ID NO: 809 - protein, 187 aa, Tursiops truncatus
MPVDLSKWSGPLSLQEVDERPQHPLQVKYGGAEVDELGKVLTPTQVKNRPTSIAWDGLDPGKLYTLVLTDPDAPSRKDPKYREWHHFLVVNMKGNDISSGTVLSDYVGSGPPKGTGLHRYVWLVYEQDRPLKCDEPILSNRSGDHRGKFKVANFRKKYELGAPVAGTCYQAEWDDYVPKLYEQLSGK

SEQ ID NO: 810 - protein, 187 aa, Urocitellus parryii
MPADLSKWNGPLSLQEVEEQPQHPLRVVYAGVEVDELGKVLTPTQVKNRPTSITWDGLDPDKLYTLVLTDPDAPSRQSPKYREWHHFLVVNMKGNDISSGTVLSDYVGSGPPSGTGLHRYVWLVYEQDKPLKCDEPILSNRSGDNRGKFKVSAFRKKYKLGSPVAGTCYQAEWDDYVPKLYEQLSGK

SEQ ID NO: 811 - protein, 228 aa, Ursus arctos horribilis
MMGTEVCVDWTMRLAVAALFLGLTMVITRDEEEGDLCLYEALSDTDAVLCKGLEVFYPELGNVGCMFVPDCNNYRQKITHWAEPIVKFPGALEGATYILVMVDPDAPSRSSPKAQFWRHWLVTDIKGIDIKKGKVQGQELSPYQPPSPPAQSGFHRYQFFVYLQQTQNISLHSKENKTRGSWKMDKFLNRFHLSEPEASTQFMTQNYQDSPNYQTPGAGSSEPKDKPK

SEQ ID NO: 812 - protein, 217 aa, Ursus arctos horribilis
MRLAVAALFLGLTMVITRDEEEGDLCLYEALSDTDAVLCKGLEVFYPELGNVGCMFVPDCNNYRQKITHWAEPIVKFPGALEGATYILVMVDPDAPSRSSPKAQFWRHWLVTDIKGIDIKKGKVQGQELSPYQPPSPPAQSGFHRYQFFVYLQQTQNISLHSKENKTRGSWKMDKFLNRFHLSEPEASTQFMTQNYQDSPNYQTPGAGSSEPKDKPK

SEQ ID NO: 813 - protein, 187 aa, Ursus maritimus
MPVDLSKWSGPLSLQEVDERPQHPLQVKYTGTEIDELGKVLTPTQVKNRPTSISWDGLDPGKLYTLVMTDPDAPSRKDPKYREWHHFLVVNMKGNNISSGTVLSDYVGSGPPKGTGLHRYVWLVYEQNGPLKCDEPILSNRSGDHRGKFKVASFRKKYELGPPVAGTCYQAEWDDYVPKLYEQLSGK

SEQ ID NO: 814 - protein, 228 aa, Ursus maritimus
MMGTEVCVDWTMRLAVAALFLGLTMVITRDEEEGDLCLYEALSDTDAVLCKGLEVFYPELGNVGCMFVPDCNNYRQKITHWAEPIVKFPGALEGATYILVMVDPDAPSRSSPKAQFWRHWLVTDIKGIDIKKGKVQGQELSPYQPPSPPAQSGFHRYQFFVYLQQTQNISLHSKENKTRGSWKMDKFQNRFHLSEPEASTQFMTQNYQDSPNYQTPGAGSSEPKDKPK

SEQ ID NO: 815 - protein, 217 aa, Ursus maritimus
MRLAVAALFLGLTMVITRDEEEGDLCLYEALSDTDAVLCKGLEVFYPELGNVGCMFVPDCNNYRQKITHWAEPIVKFPGALEGATYILVMVDPDAPSRSSPKAQFWRHWLVTDIKGIDIKKGKVQGQELSPYQPPSPPAQSGFHRYQFFVYLQQTQNISLHSKENKTRGSWKMDKFQNRFHLSEPEASTQFMTQNYQDSPNYQTPGAGSSEPKDKPK

SEQ ID NO: 816 - protein, 210 aa, Vicugna pacos
MLRICSFPALLWLSLLSALLSPAMPVDLSKWSGPLSLQEVDERPQHPLLVKYGGAEVDELGKVLTPTQVKNRPTSIAWDGLDADKLYTLVLTDPDAPSRKDPKYREWHHFLVVNMKGNNISSGTVLSDYVGSGPPKGTGLHRYVWLVYEQNSPLKCDEPILSNRSGDHRGKFKVASFRKKYGLGAPVAGTCYQAEWDDYVPKLYEQLSGK

SEQ ID NO: 817 - protein, 223 aa, Vicugna pacos
MGWTMRLAVATLLLGLTMVVTGDDEDSDLCVYEALSNNDALLCKGLEVFYPELGDIGCMYVPVCNNYRQKITYWTEPIVKFPGALDGATYILVMVDPDAPSRSSPKARFWRHWLVTDIKGSDIRKGKIQGQELSPYAPPSPPAQSGFHRYQFFVYLQEGKTISLLPKENKTRGFWKMNKFLSRFHLGEPEASTQFMTQYYQDSPNLQTRGRGSSELQDKPKPR

SEQ ID NO: 818 - protein, 187 aa, Vulpes vulpes
MPVDLGKWSGPLSLQEVEERPQHALHVKYTGTEVDELGKVLTPTQVKNRPTSIAWDGLDPGKLYTLVLTDPDAPSRKDPKYREWHHFLVVNMKGNDISSGTVLSDYVGSGPPKGTGLHRYIWLVYEQSGPLKCDEPILSNRSGDHRGKFKVASFRKKYELGPPVAGTCYQAEWDDYVPKLCEQLSGK

SEQ ID NO: 819 - protein, 221 aa, Vulpes vulpes
MDWTMKLATAALFLGLTMVVTRDEDEGDMCLYEALSDTDAVLCKGLEVFYPELGNIGCMFVPDCNNYRQKITHWAEPIVKFPGALEGATYILVMVDPDAPSRSSPKAQFWRHWLVTDIKGIDIKKGKLQGQELSPYQPPSPPAKTGFHRYQFFIYLQEGKNISLHSKENKTRASWKMDKFLNRFHLSEPEASTQFMTQNYQDSPNYQTPGTGSSEPRDKPK

SEQ ID NO: 820 - protein, 187 aa, Drosophila melanogaster
MSDSTVCFSKHKIVPDILKTCPATLLTVTYGGGQVVDVGGELTPTQVQSQPKVKWDADPNAFYTLLLTDPDAPSRKEPKFREWHHWLVVNIPGNQVENGVVLTEYVGAGPPQGTGLHRYVFLVFKQPQKLTCNEPKIPKTSGDKRANFSTSKFMSKYKLGDPIAGNFFQAQWDDYVPKLYKQLSGKK

SEQ ID NO: 821 - protein, 176 aa, Drosophila melanogaster
MDTAGIIPDIIDVKPASKATITYPSGVQVELGKELTPTQVKDQPTVVFDAEPNSLYTILLVDPDAPSREDPKFRELLHWLVINIPGNKVSEGQTIAEYIGAGPREGTGLHRYVFLVFKQNDKITTEKFVSKTSRTGRINVKARDYIQKYSFGGPVAGNFFQAQYDDYVKTLIETVQ

SEQ ID NO: 822 - protein, 179 aa, Drosophila melanogaster
MDDIVPDVLDAVPAGTIKVIYGDDLEVKQGNELTPTQVKDQPIVSWSGLEGKSNLLTLLMVDPDAPTRQDPKYREILHWSVVNIPGSNENPSGGHSLADYVGSGPPKDTGLHRYIFLLYRQENKIEETPTISNTTRTGRLNFNARDFAAKHGLGEPIAANYYQAQYDDYVPIRNKTIVG

SEQ ID NO: 823 - protein, 210 aa, Drosophila melanogaster
MKLPALHLLFLGFICLARSQDNDENVRRIMKEMEVIPEILDEPPRELLRIKYDNTIDIEEGKTYTPTELKFQPRLDWNADPESFYTVLMICPDAPNRENPMYRSWLHWLVVNVPGLDIMKGQPISEYFGPLPPKDSGIQRYLILVYQQSDKLDFDEKKMELSNADGHSNFDVMKFTQKYEMGSPVAGNIFQSRWDEYVPELMKTLYGVSE

SEQ ID NO: 824 - protein, 257 aa, Drosophila melanogaster
MICMRLRVLRNLNRSALNGFRKDYIRSTGVNVNYSAVNFPAAIRTLKTFSNSILTKEPKPIFAFIASQRQYSCEKVGKTMEEHCVVPDVIAKAPAQTAVVEYPGDIVVKPGQVLTPTQVKDEPCVKWEADANKLYTLCMTDPDAPSRKDPKFREWHHWLVGNIPGGDVAKGEVLSAYVGSGPPPDTGLHRYVFLIYEQRCKLTFDEKRLPNNSGDGRGGFKIAEFAKKYALGNPIAGNLYQAEYDDYVPILYKQLGA

SEQ ID NO: 825 - protein, 211 aa, Drosophila melanogaster
MRFAPSLSLKSTRGVHQSDTEVSKIMRSLDVIPDVIHIGPQEFLNVTYHGHLAAHCGKVLEPMQVRDEPSVKWPSAPENYYALLMVDPDVPNAITPTHREFLHWMVLNIPGNLLALGDVRVGYMGATPLKGTGTHRFVFLLYKQRDYTKFDFPKLPKHSVKGRSGFETKRFAKKYRFGHPVAGNFFTSQWSPDVPSLIKAISHNARQVAHF

SEQ ID NO: 826 - protein, 202 aa, Drosophila melanogaster
MLRVLLPLVGCLLAVQAGSVEEVFRSHQVVPDVIPEPPNQLLKVTYSNNLVAKDGVELTPTQVKDQPVVEWDAQPGEFYTLIMTDPDAPSRAEPKFREFKHWILANIAGNDLASGEPIAEYIGSGPPQGTGLHRYVFLLYKQSGKLEFDEERVSKRSRKDRPKFSAAKFAINHELGNPIAGTFYQAQYDDYVPKLHKQLSEN

SEQ ID NO: 827 - protein, 202 aa, Drosophila melanogaster
MLVSCPILCPVEKLVTELKRHHVIPRLFACKPTKVISVLYPCDIDIKPGIMVVINETLKQPIIRFKADPEHYHTLMMVDLDVPPDNNTEWLIWMVGNIPGCDVAMGQTLVAYDNRRTIHGSNIHRIVFLAFKQYLELDFDETFVPEGEEKGRGTFNCHNFARKYALGNPMAANFYLVEWLWRWTPTYLVSEHEFEPSNGNEN

SEQ ID NO: 828 - protein, 211 aa, Aedes aegypti
MSISRLQSCSTLARGLLSSTNSIRLFASSVAKSMDKHQVVPDVIPVAPAEVAKVSYASGAVVNEGNELTPTQVKDVPKVEWNADSAALYTLCMTDPDAPSRKEPTYREWHHWLVGNIPGGDVAKGETLSEYVGSGPPQGTGLHRYVFLVYKQNGKLTFDEPRLTNRSGDNRGGFSIRKFAEKYNLGNPVAGNFYQAEWDDYVPILYKQLGA

SEQ ID NO: 829 - protein, 211 aa, Aedes aegypti
MSISRLQSCSTLARGLLFSTNSIRLFVSSVAKSMDKHQVVPDVIPVAPAEVAKVSYASGAVVNEGNELTPTQVKDVPKVEWNADSAALYTLCMTDPDAPSRKEPTYREWHHWLVGNIPGGDVAKGETLSEYVGSGPPQGTGLHRYVFLVYKQNGKLTFDEPRLTNRSGDNRGGFSIRKFAEKYNLGNPVAGNFYQAEWDDYVPILYKQLGA

SEQ ID NO: 830 - protein, 178 aa, Aethina tumida
MEKHGVVPDVIDAAPSAVAEVTYPSGAKVDLGNELTPTAVKDIPTIKWNAESDALYTVCMTDPDAPSRKEPTYREWHHWLVGNIPGGDVSKGETLSAYIGSGPPQGTGLHRYVFLVYKQSGKINFDEKRLPNNSGDGRGCFSIRKFAAKYNLGQPIAGNLYQAEWDDYVPILYKQLGE

SEQ ID NO: 831 - protein, 202 aa, Aethina tumida
MALKLLSRNTFNQFTRCFSAVAKNMEKHGVVPDVIDAAPSAVAEVTYPSGAKVDLGNELTPTAVKDIPTIKWNAESDALYTVCMTDPDAPSRKEPTYREWHHWLVGNIPGGDVSKGETLSAYIGSGPPQGTGLHRYVFLVYKQSGKINFDEKRLPNNSGDGRGCFSIRKFAAKYNLGQPIAGNLYQAEWDDYVPILYKQLGE

SEQ ID NO: 832 - protein, 178 aa, Aethina tumida
  misc_feature (71)..(71): Xaa can be any naturally occurring amino acid
MQKLQVVPDVIDSVPPDTLEVKYQSGATPNNGNVLTPTQVKSPPTVTWKTEGDNLYALCMTDPDAPSRQAXKFREWHHWLVVNIPGKDIGKGEVLSEYIGAGPPKNTGLHRYVLLVYKQPGKINCDEPRLKNNSGSNRGNFSVRKFAKKYNLGNPIAGNFFQAEYDDYVPKLYAQLKG

SEQ ID NO: 833 - protein, 178 aa, Agrilus planipennis
MEKHAIVPDVLDKIPQKVLEVVYTGNVKVDLGNELTPTKVKDPPTVKWDAEEGSFYLLCMTDPDAPSRSNPKFREWHHWLVGNIPGNDIAKGQVLSEYIGAGPPKGSGLHRYIIVVYKQSGKLNFDEKELTNRSGDGRGKFSIRKFAAKYKLGDPIAGNLFQAQWDDYVPKLYKQLGS

SEQ ID NO: 834 - protein, 181 aa, Anoplophora glabripennis
MKAFKDNEVTPDVISTVPDVLLEVEYAKTGKRVNLGNELAPKDVKDIPEVKYNAEPDSFYTLILTDPDAPSRKNPTRREWNHWLVVNIPGSNISEGETITEYVGSAPPKGSGLHRYVFVLFKQPGKLTFDEPQHSKTDGKRGNFSTEKLRKKYNLGKPLAGNFFQAQFDDSVPAAHKQLGF

SEQ ID NO: 835 - protein, 181 aa, Anoplophora glabripennis
MEAFKTNEIVPDVISTVPAKVLSVRFKSGKQVNLGEEIQPKYVTESPEVQYDSDPNSFYTLVFTDPDAPSRKNPIRREWHHWLVVNIPGSKVSEGEVLSEYIGSAPPQGSELHRYTFILYKQPQKLSFDEPRHSNTDPARGNFSTEKFAQKYNLGSPVAGNFYFAQWDESVPILRKKLGFD

SEQ ID NO: 836 - protein, 200 aa, Anoplophora glabripennis
MRIIILLTVFVTFISCDDVDKAFKDNEVTPDVISTVPDVLLEVEYAKTGKRVNLGNELAPKDVKDIPEVKYNAEPDSFYTLILTDPDAPSRKNPTRREWNHWLVVNIPGSNISEGETITEYVGSAPPKGSGLHRYVFVLFKQPGKLTFDEPQHSKTDGKRGNFSTEKLRKKYNLGKPLAGNFFQAQFDDSVPAAHKQLGF

SEQ ID NO: 837 - protein, 180 aa, Anoplophora glabripennis
MSKAWSSKQVVPDVVDDAPPEKLTVKYPEVTVNEGNIAKPKQVKSPPEVSWTVEGDALYTICMTDPDAPSRKKPSAREWHHWLVVNIPGNSVDKGDTLSEYVGAGPPQGTGLHRYVILVYKQPGKINPSEKKITNRQGQGRGKFCIRKFAEKYNLGQPIAGNFFEAEFDDYVPKLHQQLG

SEQ ID NO: 838 - protein, 205 aa, Bactrocera dorsalis
MLNLKHLLFVSLFYMAHAADSDITKFMKHLEVIPDVIAEGPKDFLKVSYDSGVVADKGVELTPTQVKHQPKVEWNPESTNTFYTLIMTDPDAPSRAKPEMREWHHWLVVNIPGNSLDKGEVLSAYIGSGAPKDTGLHRYVFLLYKQPKKLEFTETHLTNTSAKGRENFSTKNFAEKYGLGVPVAGNFFQAQYDDYVPELYKQLGF

SEQ ID NO: 839 - protein, 205 aa, Bactrocera latifrons
MLKLKHLLLVSLFYMACAADSDITKFMKHLEVIPDVIAEGPKDFLKVSYDSGVVADKGVELTPTQVKHQPKVEWNPESTDTFYTLIMTDPDAPSRAKPEMREWHHWLVVNIPGNSLYKGEVLSAYIGSGAPKDTGLHRYVFLLYKQPKKLEFTETHLTDTSAKGRENFSTKNFAEKYGLGVPVAGNFFQAQYDDYVPELYKQLGF

SEQ ID NO: 840 - protein, 192 aa, Bactrocera latifrons
MAAASTSDSTDVVFKQHKVVPDVIPVAPKQFLKVSYKNVLVENGKELTPTQVAAQPSIEWNAENNVFYTIIMTDPDAPSRSNPKFREFNHWLVTNIPGTDISSGDVLTAYVGSGPPQGTGLHRYVFLVYKQPVKIRFQETRVPKNSSQNRPNFSTAKFAKKYKLGDPIAGNFFQAQWDEYVPTVHRQLSGKK

SEQ ID NO: 841 - protein, 205 aa, Bactrocera oleae
MLNLKHLFLLSLVYMAHCTDSDITKFMKHLEVIPDVIAEGPKNFLKVSYDSGVVADKGVELTPTQVKHQPKVEWNPETADTYYTLIMTDPDAPSRAKPDMREWHHWLVVNIPGNTLEKGEVLSAYVGSGAPKDTGLHRYVFLLYKQPKKLEFSETHLTNTSAKGREKFSTKNFAEKYVLGVPVAGNFFQAQYDDYVPELYKQLGF

SEQ ID NO: 842 - protein, 182 aa, Bombus impatiens
MAQALQTHGVVPDVIDKVPQNVLQVTYPNNLAIEIGKVLTPTQVKDPPSVKWDGDASVFYTLCMTDPDAPSRKEPKFREWHHWLVGNIPGSDVSKGEVLSQYIGSGPPEGTGLHRYVFLLYKQPQKLTFDEPRLTNRSGDNRANFSIKKFAAKYKLGNPIAGNMYQAEFDDYVPLLYKQLGG

SEQ ID NO: 843 - protein, 208 aa, Bombus impatiens
MLLSINATSLIARKPLVEIGTRLLSSMAQALQTHGVVPDVIDKVPQNVLQVTYPNNLAIEIGKVLTPTQVKDPPSVKWDGDASVFYTLCMTDPDAPSRKEPKFREWHHWLVGNIPGSDVSKGEVLSQYIGSGPPEGTGLHRYVFLLYKQPQKLTFDEPRLTNRSGDNRANFSIKKFAAKYKLGNPIAGNMYQAEFDDYVPLLYKQLGG

SEQ ID NO: 844 - protein, 208 aa, Bombus lantschouensis
MLLLINATSLIARKPLVEIGTRLLSSMAQALQTHGVVPDVIDKVPQNVLQVTYPNNLAIEIGKVLTPTQVKDPPSVKWNGDASVFYTLCMTDPDAPSRKEPKFREWHHWLVGNIPGSDVSKGEVLSQYIGSGPPEGTGLHRYVFLLYKQPQKLTFDEPRLTNRSGDNRANFSIKKFAAKYKLGDPIAGNMYQAEFDDYVPLLYKQLGG

SEQ ID NO: 845 - protein, 182 aa, Bombus terrestris
MAQALQTHGVVPDVIDKVPQNVLQVTYPNNLAIEIGKVLTPTQVKDPPSVKWDGDASVFYTLCMTDPDAPSRKEPKFREWHHWLVGNIPGSDVSKGEVLSQYIGSGPPEGTGLHRYVFLLYKQPQKLTFDEPRLTNRSGDNRANFSIKKFAAKYKLGDPIAGNMYQAEFDDYVPLLYKQLGG

SEQ ID NO: 846 - protein, 208 aa, Bombus terrestris
MLLLINATSLIARKPLVEIGTRLLSSMAQALQTHGVVPDVIDKVPQNVLQVTYPNNLAIEIGKVLTPTQVKDPPSVKWDGDASVFYTLCMTDPDAPSRKEPKFREWHHWLVGNIPGSDVSKGEVLSQYIGSGPPEGTGLHRYVFLLYKQPQKLTFDEPRLTNRSGDNRANFSIKKFAAKYKLGDPIAGNMYQAEFDDYVPLLYKQLGG

SEQ ID NO: 847 - protein, 227 aa, Bos taurus
MKVPMGWTMRLVTAALLLGLAVAVTGEEEDADLCVYEALPDNDAVLCKGLKVFYPELGNIGCMIVPECNNYRQKITTWPEPIVKFPQALDDAAYILVMVDPDAPSRSSPKARFWRHWLVSDIKGSDMKIGKIQGQELSPYHPPSPPAHSGLHRYQFFVYLQEGRTISLSPKENKTRGSWKMDKFLSHFHLTEPEASTQFMTQYYLDGLSRQNPGVVSNETTDKPEPK

SEQ ID NO: 848 - protein, 184 aa, Branchiostoma belcheri
MAADAFIKNGIVPDIVDTAPTETAAVTYESNTTIVDFGNELTPTQVKSPPQVIWAAEEGYLYTLIMTDPDAPSRSNPKFREWHHWLIVNIPGHDIGRGEVLTDYIGAAPPKDSGLHRYVFLVYRQQGKLTCNEERLPNNSTANRGKFKTKVFATKYKLGNPVAGNFFQAQWDDWVPQLYASMKK

SEQ ID NO: 849 - protein, 271 aa, Branchiostoma belcheri
MRTALGMVSVLLGISRLFRLFTRTPRHFFRDQHQEEDEDLRRRTRQFGGGRVDHLEGSQGSVQRLMGKSGSKGPGASGPAGPELTGNMAADAFIKNGIVPDIVDTAPTETAAVTYESNTTIVDFGNELTPTQVKSPPQVIWAAEEGYLYTLIMTDPDAPSRSNPKFREWHHWLIVNIPGHDIGRGEVLTDYIGAAPPKDSGLHRYVFLVYRQQGKLTCNEERLPNNSTANRGKFKTKVFATKYKLGNPVAGNFFQAQWDDWVPQLYASMKK

SEQ ID NO: 850 - protein, 259 aa, Branchiostoma floridae
MVSVLLGISRLFRLLTRTPRHSLRDHQEEEGARRRGREFGERAVQSEGSQGSLDRLMGKSGSKPGASGPLELTGNMAADAFLKNGIVPDIVDKPPTETAAVTYEGNTIIVDFGNELTPTQVKSPPQVTWAAEEGYLYTLIMTDPDAPNRSNPKFREWHHWLIVNIPGNDLGRGEVLTDYIGAAPPKESGLHRYVFLVYQQRGKLTCNESRLPNDSTANRGKFKTKVFATKYKLGNPVAGNFFQAQWDDWVPQLYAGMKK

SEQ ID NO: 851 - protein, 185 aa, Brugia malayi
MSVEEAFKKYQVVPDVISMVPTKLINVDYSGGVKVNLGNELTPTQVKDEPKVSWDAEAKSLYTLVMTDPDAPSRQNPKFREWHHWLVANIPGQDVSKGDVFSEYIGSGPPKGTGLHRYVFLVYKQPEKIVDVQHGHLTNRSGKNRANFKIAKFAEKHKLGNPIAGNFYQAQYDNYVAKLYEQLSD

SEQ ID NO: 852 - protein, 230 aa, Brugia malayi
MLFVRAVVSFKSSPFSVLASLHQSSSVVIFVTQQKFSLLRGSDTTMSVEEAFKKYQVVPDVISMVPTKLINVDYSGGVKVNLGNELTPTQVKDEPKVSWDAEAKSLYTLVMTDPDAPSRQNPKFREWHHWLVANIPGQDVSKGDVFSEYIGSGPPKGTGLHRYVFLVYKQPEKIVDVQHGHLTNRSGKNRANFKIAKFAEKHKLGNPIAGNFYQAQYDNYVAKLYEQLSD

SEQ ID NO: 853 - protein, 216 aa, Brugia malayi
MAIMCTTMHYLLLMIVVMLYPISTEQGSDTTMSVEEAFKKYQVVPDVISMVPTKLINVDYSGGVKVNLGNELTPTQVKDEPKVSWDAEAKSLYTLVMTDPDAPSRQNPKFREWHHWLVANIPGQDVSKGDVFSEYIGSGPPKGTGLHRYVFLVYKQPEKIVDVQHGHLTNRSGKNRANFKIAKFAEKHKLGNPIAGNFYQAQYDNYVAKLYEQLSD

SEQ ID NO: 854 - protein, 205 aa, Ceratitis capitata
MLKLKHLLLISVASLAYAEDSDITKFMKHLEVIPDLIAEGPKDFLKVIFDSGVMADKGVELKPRQVKNQPKVEWKPDSADSYYTLIMTDPDAPSRAKPEWREWHHWLVVNIPGNAVDKGEVLSAYVGSGAPKDTGLHRYVFLLYKQPKKLEFTEAHLTNTSPKGREKFSTKNFVAKYGLGVPVAGNFFQAQYDDYVPELYKQLGF

SEQ ID NO: 855 - protein, 202 aa, Ceratitis capitata
MASATSSGGVEEFFKQHKVVPDVIPVAPREFLKVVIHINIYTYINYKGVTAENGIELTPTQVAAQPTIEWNAESEAFYTLIMTDPDAPSRKDPKFREFHHWLVANIPGGNVNNGDVLTAYVGSGPPQGTGLHRYVFLIYKQPAKIRFQEPRIPKNSSQNRPNFRSATFAKKYKLGNPIAGNFYQAQWDEYVPTVHRQLAGKK

SEQ ID NO: 856 - protein, 237 aa, Ceratitis capitata
MSNRIVSPTICISHLHSVTFCYILVQLRKALLIVVMASATSSGGVEEFFKQHKVVPDVIPVAPREFLKVVIHINIYTYINYKGVTAENGIELTPTQVAAQPTIEWNAESEAFYTLIMTDPDAPSRKDPKFREFHHWLVANIPGGNVNNGDVLTAYVGSGPPQGTGLHRYVFLIYKQPAKIRFQEPRIPKNSSQNRPNFRSATFAKKYKLGNPIAGNFYQAQWDEYVPTVHRQLAGKK

SEQ ID NO: 857 - protein, 178 aa, Cryptotermes secundus
MEKHGVVPDVIDTAPGSKLEVTYGSLSVDEGNELTPTQVKDPPTVKWDAEDGSYYLLCMTDPDAPSRKDPKFREWHHWLVGNIPGNSVSQGETLSEYVGSGPPKGTGLHRYVFLVYLQPGKITYDEPRLTNRSGDNRGKFSIRNFAKKHNLGNPIAGNFYQAQWDDYVPKLYEQLSGK

SEQ ID NO: 858 - protein, 199 aa, Cryptotermes secundus
MIARRPILNIISRLLSTVSKTMEKHGVVPDVIDTAPGSKLEVTYGSLSVDEGNELTPTQVKDPPTVKWDAEDGSYYLLCMTDPDAPSRKDPKFREWHHWLVGNIPGNSVSQGETLSEYVGSGPPKGTGLHRYVFLVYLQPGKITYDEPRLTNRSGDNRGKFSIRNFAKKHNLGNPIAGNFYQAQWDDYVPKLYEQLSGK

SEQ ID NO: 859 - protein, 186 aa, Drosophila ananassae
MSEAADCFSKHKIVPDVLKSCPDKLLKITYPSGQEANMGVELTPTQVKDQPKVVWDADPNALYTLILTDPDAPSRQDPKFREWHHWLVVNIPGNQIENGQVLTAYVGSGPPKGSGLHRYVFLVFKQPQKLTCSEPKIPKTSGDKRANFSTAKFIKKYSLGDPIAGNFYQAQWDDYVPKLYKQLSGK

SEQ ID NO: 860 - protein, 175 aa, Drosophila ananassae
MDDIVPDVLDAVPAGTVQVSYAENEVSQGNELTPTQVKDTPTVQWCACEGDNLYTLLMVDPDAPSRQDPKFREILHWAVVNIKGSDITTGFPLATYVGSGPPQGTGLHRYIFLVYRQENKIEEGETIPNNVRAGRLNFSARQFAAKHGLGDPIAANYYQAQYDDYVPIRNKTMIG

SEQ ID NO: 861 - protein, 179 aa, Drosophila arizonae
MNALVPDVVDEAPPKDKLKVTYAADLVVKEGNELTPLQVKDEPQVSWDTPEGEEGQLHTLLMVDPDAPSRKEPKFREILHWAVVNIPGNQLSKGQTLAEYIGSGPPEGTGLHRYIFLLYRQSKGIEETLHIDKRTREGRFNFSARTFAGKHGLGKPIAGCFYEAQYDDYVPIRNKEFAG

SEQ ID NO: 862 - protein, 187 aa, Drosophila biarmipes
MSEAAVCFAKHKIVPDILKTCPTSLLKVTYGGGQVVDMGGELTPTQVQDQPRVEWEADPYALYTLILTDPDAPSRKDPKFREWHHWLVVNIPGNQVENGTVLTAYVGSGPPQGTGLHRYVFLVYKQAQKLTCNEPKIPKTSGDKRANFSTTKFMSKYKLGDPIAGNFFQAQWDEYVPKLYKQLSGKK

SEQ ID NO: 863 - protein, 186 aa, Drosophila bipectinata
MSEATDCFSKHKIVPDVLKTCPDKLLKVTYPSGQEANMGIELTPTQVKDQPKVVWDADPNALYTLILTDPDAPSRKDPKFREWHHWLVVNIPGNQIENGQVLTAYVGSGPPQGTGLHRYVFLVFKQPQKLSCNEPKIPKTSGDKRANFSTAKFIKKYNLGDAVAGNFYQAQWDDYVPKLYKQLSGK

SEQ ID NO: 864 - protein, 187 aa, Drosophila erecta
MSDSTVCFSKHKIVPDILKTCPTNLLTVTYSGGQVVDIGGELTPTQVQNQPKVEWDADPNALYTLILTDPDAPSRKEPKFREWHHWLVVNIPGNQVDNGVVLTAYVGAGPPQGTGLHRYVFLVYKQPQKLTCNEPKIPKTSGDKRANFSTSKFMSKYKLGDPIAGNFFQAQWDEYVPKLYKQLSGKK

SEQ ID NO: 865 - protein, 179 aa, Drosophila erecta
MDDIVPDVLDAVPAGTIKVVYGDGLDLKQGNELTPTQVKDQPIVSWSGLEGKSNLFTLLMVDPDAPSRQDPKYREILHWGVVNIPGGNVDPSGGHPVAAYVGSGPPEGTGLHRYIFLLYRQENKIEETPTISNTIRAGRLNFKARDFAAKHGLGEPIAANYYQAQYDDYVPIRNKTMVG

SEQ ID NO: 866 - protein, 187 aa, Drosophila eugracilis
MSEAAVCFSKHKIVPDILKTCPTNLLKVTYSGGQVVDMGEELTPTQVQNPPKVEWDADPNALYTLILTDPDAPSRKDPKYREWHHWLVVNIPGNQVESGMVLTAYVGSGPPQGTGLHRYVFLVYKQPQKLTCSEPKIPKTSGDKRANFSTIKFMSKYKLGDPIAGNFFQAQWDEYVPKLYKQLSGKK

SEQ ID NO: 867 - protein, 187 aa, Drosophila ficusphila
MADSTVCFSKHKIVPDILKTCPTSLLKVTYDGGQVVDMGGELTPTQVQNQPKVEWDADPNALYTLILTDPDAPSRKDPKFREWHHWLVVNIPGNQVENGMVLTAYVGSGPPQGTGLHRYVFVVFKQPQKLTCSEPKIPKTTGDKRANFSTSKFINKYKLGDPIAGNFFQAQWDDYVPKLYKQLSGKK

SEQ ID NO: 868 - protein, 179 aa, Drosophila ficusphila
MDDIVPDVVDAVPAGTVQVTYTGDLPVKQGNELTPTQVKDVPNVSWSGLEGKSNLLTLLMVDPDAPTRQDPKFREILHWAVVNIPGGNTDPSGGYPLVAYVGSGPPEGTGLHRYIFLLYRQENKIEETPTISNTTRAGRLNFNARDFAARHGLGAPIAANYYQAQFDDFVPIRNKTFTG

SEQ ID NO: 869 - protein, 177 aa, Drosophila grimshawi
MNDLVPDVVDEAPPKNKLHVTYPPEIVVREGNELTPRQVKDQPQVNWENDAPTALHTLLMVDPDAPSRADPKFREILHWAVINIPGIQLSQGQELAEYIGSGPPEGTGLHRYIFLLYRQSHKIDDPQHIDKRTREGRFNFSARQFASKHGLGKPIAGNYYQAQYDGFVPVRNKEFTG

SEQ ID NO: 870 - protein, 189 aa, Drosophila guanche
MSSSEAAECFAKHGIVPDILPAAPAALLTVTYGGGLVVDKGAELTPTQVKAHPTVEWDAEPGAMYTLLLTDPDAPSRKEPKFREWHHWLVVNIPGTQIATGDVLTEYVGAGPPDGTGLHRYVFLLFKQKQKLSCKEKRIPKTSGDNRAKFSTSKFVAKYDLGTPVAGNFFQAKYDSYVPKLYKQLSGKK

SEQ ID NO: 871 - protein, 179 aa, Drosophila guanche
MEDIVPDVLDSVPKGTLQVMYAGRHFVEQGNELTPTQVKDEPHVTWVSPESEGRETLLTLLMVDPDAPSRVDPTYREILHWAVVNIPGDDPRAGYALAEYMGAGPPLNTGLHRYIFLLYRQSRKIEETESTPKNIRKGRLNFNARDFASKHQLGSPIAANYFQAQYDDYVPIRNKTFTG

SEQ ID NO: 872 - protein, 179 aa, Drosophila hydei
MNALVPDVVDEAPPKDKLKVNYAAELAVKEGNELTPLQVKDEPQVSWATSADDKEQLHTLLMVDPDAPSRKEPKFREILHWAVVNIPGNQLSKGQTLAEYIGSGPPEGTGLHRYIFLLYRQSQKIEETLHIDKRTRQGRLNFSARAFAGKYGLGKPIAGNFYEAQYDDYVPIRNKEFSA

SEQ ID NO: 873 - protein, 178 aa, Drosophila kikkawai
MDDIVPDVVDAVPAGDIQVIYGEGNAVKQGNELTPTQVKDQPSVTWDGLAGESDLITLLMVDPDAPSRQEPKLREILHWAVVNIPGSDLSKGQPVAAYIGSGPPEGTGLHRYIFLLYRQTGKIEIDTPPIPNTVRAGRLNFNARDFAAKHGLGSPIAANYYQAQYDDWVLIRNKTMTG

SEQ ID NO: 874 - protein, 187 aa, Drosophila kikkawai
MSEDTACFSKHKIVPDILKTCPYKQLKVTYGGGQVVDMGRELAPKQVKDQPKVEWDAEPDALYTLILTDPDAPSRKQPKYREWHHWLVVNIPGNQIDNGLVLTAYVGAGPPQGTGLHRYVFLVFKQPHMLTCNEPRIPKTTGEKRPNFSTAKFITKYKLGDPIAGNFFQAQWDEYVPQLYKQLSGKK

SEQ ID NO: 875 - protein, 179 aa, Drosophila miranda
MEDIVPDVVDSVPKGRLQVMYGGNLFVEQGNALTPTQVKDEPKVTWESVEGQDSNTLLTLLMVDPDAPSRADPEFREILHWAMVNIPGDDPCRGYALAEYMGAGPPLNTGLHRYVFLLYRQREKIEQTATIPKTIRQGRLNFSARDFASKHRLGSPIAANYFQSQYDDYVPIRNKLFTG

SEQ ID NO: 876 - protein, 179 aa, Drosophila navojoa
MNALVPDVVDEAPPKDKLKVTYAADLSVKEGNELTPLQVKDEPQVSWDTPEGEEEQLYTLLMVDPDAPSRKEPKFREILHWAVVNIPGNQLSKGQTLAEYIGSGPPEGTGLHRYIFLLYRQSQRIEETLHIDKRTREGRFNFSARTFAGKHGLGKPIAGCFYEAQYDDYVPIRNKDFAG

SEQ ID NO: 877 - protein, 189 aa, Drosophila obscura
MSSSEAAECFAKHEIVPDILPVAPKELLKVTYGGDLVVDKGAELTPTQVKAHPSVEWNAEPEALYTLLLTDPDAPSRKEPKFREWHHWLVVNIPGNQIAKADVLTEYVGAGPPEGTGLHRYVFLLFKQKQKLSCKEKRIPKTSGDNRAKFSTTKFVGKYGLGNPVAGNFFQAKYDRYVPKLYKQLAGKK

SEQ ID NO: 878 - protein, 189 aa, Drosophila persimilis
MSSSEAAECFAKHEIVPDVVPVGPNKLLKVTYGGGLVVDKGAELTPTQVKAQPNVEWDAEPEALYTLILTDPDAPSRKQPKFREWHHWLVVNIPGTQIAKGDVLSEYVGAGPPEGTGLHRYVFLLFKQKQKLSCKEPRIPKTSGDNRAKFSTTKFVGKYDLGNPVAGNCFQAKYDDYVPKLYKQLSGKK

SEQ ID NO: 879 - protein, 179 aa, Drosophila persimilis
MEDIVPDVVDSVPKGRLQVMYGGNLFVEQGNALTPTQVKDEPKVTWESDEGQERDTLLTLLMVDPDAPSRADPEFREILHWAMVNIPGDDPCRGYALAEYIGAGPPLNTGLHRYVFLLYRQREKIEQTATIPKTIRKGRLNFSARDFASKHRLGSPIAANYFQAQYDDYVPIRNKLFTG

SEQ ID NO: 880 - protein, 416 aa, Drosophila persimilis
MLIHHWILLGLSWTLCNADFYSETEVGKFLRHLEVIPDVIEAGPQEFLNVTYLGFIQADRGVELQPMQVRDEPYVAWNAPMTNYYTLLMIDPDAPSPQQPSAREKLHWMVLNIPGNQLIMGDVRAGYVGPTPASGSGLHRYVFLLYRQQDYTKFDFPRLPKHILTGRSKFRSMQFAKRYKLGYPVAGNVFTATWSTDVPALYNSISRGAKQKITLLETKQNISKRSKMSSSEAAECFAKHEIVPDVVPVGPNKLLKVTYGGGLVVDKGAELTPTQVKAQPNVEWDAEPEALYTLILTDPDAPSRKQPKFREWHHWLVVNIPGTQIAKGDVLSEYVGAGPPEGTGLHRYVFLLFKQKQKLSCKEPRIPKTSGDNRAKFSTTKFVGKYDLGNPVAGNCFQAKYDDYVPKLYKQLSGKK

SEQ ID NO: 881 - protein, 179 aa, Drosophila pseudoobscura pseudoobscura
MEDIVPDVVDSVPKGRLQVMYGGNLFVEQGNALTPTQVKDEPKVTWEGDEGQERDTLLTLLMVDPDAPSRADPEFREILHWAMVNIPGDDPCRGYALAEYIGAGPPLNTGLHRYVFLLYRQREKIEQTATIPKTIRKGRLNFSARDFASKHRLGSPIAANYFQAQYDDYVPIRNKLFTG

SEQ ID NO: 882 - protein, 187 aa, Drosophila serrata
MSDDTICFSDHKIVPDVLQSCPYKMLKVTYSGGQRVDMGRELTPTQVKQQPTVEWEADPNTLYTLILTDPDAPSRKDPKYREWHHWLVVNIPGNNIEEGQVLTAYVGAGPPEGTGLHRYVFLVFKQNQQLNCNEPRIPKTSGDKRSNFSTAKFITKYKLGNPIAGNFFQAQWDDYVPQLYKQLSGKK

SEQ ID NO: 883 - protein, 187 aa, Drosophila simulans
MSDSTVCFSKHKIVPDILKTCPATLLTVTYGGGQVVDVGGELTPTQVQSQPKVEWDADPNAFYTLLLTDPDAPSRKEPKFREWHHWLVVNIPGNQVEKGVVLTEYVGAGPPQGTGLHRYVFLIYKQPQKLTCNEPKIPKTSGDKRANFSTSKFMSKYKLGDPIAGNFFQAQWDDYVPKLYKQLSGKK

SEQ ID NO: 884 - protein, 187 aa, Drosophila suzukii
MSKAAVCFSKHKIVPDILKTCPTSLLKVTYGGGQVVDMGGELTPTQVQDQPRVEWDADPNALYTLILTDPDAPSRKDPKFREWHHWLVVNIPGNQIENGTVLTAYVGSGPPQGTGLHRYVFLVYKQAQKLTCNEPKIPKTSGDKRANFSTTKFMSKYKLGDPIAGNFFQAQWDEYVPKLYKQLSGKK

SEQ ID NO: 885 - protein, 187 aa, Drosophila takahashii
MSEAAVCFSKHKIVPDILKTCPTSLLKVTYGGGQMVDMGGELTPTQVKDQPNVEWDADPNALYTLILTDPDAPSRKDPKFREWHHWLVVNIPGNQIENGTVLTAYVGSGPPQGTGLHRYVFLVYKQSQKLTCSEPKIPKTSGEKRANFSTTKFMSKYKLGDPIAGNFFQAQWDEYVPKLYKQLSGKK

SEQ ID NO: 886 - protein, 186 aa, Drosophila virilis
MAEAVESFAKHKIVPDVVQVAPMKLLKVTYSGGLDVNNGNELTPTQVKSAPQLEWSAEPDALYTVLLTDPDAPSRKEPKFREWHHWLVVNVPGTQIDKGDVLSAYVGSGPPQGTGLHRYVFLIFKQPQKLSCNEPRIPKTSGDKRGKFNTVKFASKYQLGNPIAGNFYQAQWDNYVPKLYKQLSGK

SEQ ID NO: 887 - protein, 187 aa, Drosophila yakuba
MSESTVCFSKHKIVPDILKTCPTNLLTVTYSGGQVVDIGSELTPTQVQNQPKVEWDADPNALYTLILTDPDAPSRKEPKFREWHHWLVVNIPGNQVDNGVVLTAYVGAGPPQGTGLHRYVFLVYKQPQKLTCNEPKIPKTSGDKRANFSTSKFMSKYKLGDPIAGNFFQAQWDDYVPKLYKQLSGKK

SEQ ID NO: 888 - protein, 205 aa, Halyomorpha halys
MFEFVFPRSALLVAVLISVARASDSRLSAMEKHQVVPDVLPTVPSSVLSVNYPDHKVDLGNELTPTIVKDEPTVTWDADPNSFYTLCMTDPDAPSRATPKAREWHHWLVVNIPGSEVKKGEVLSAYIGSAPPKGTGLHRYVFVVYKQPKKLEFDEPRLPNNSPKNRANFSIAKFASKYDLGKPIAGNFYQAAWDEYSDEVHKRLA

SEQ ID NO: 889 - protein, 105 aa, Homo sapiens
MTDPDVPGPSDPYMKEHLHWMVTDIPGTTDSTFGKELTSYEKPKPNIGIHRYVFVLFKQKRGNKYSITCPFSRDYFNTRNYQNDLGVPVAAAYFNARRATAPRRR

SEQ ID NO: 890 - protein, 180 aa, Leptinotarsa decemlineata
MKEFKSNEVVPDVLNDAPDKLLEIKYKSGKDVRLGNELTPKQVLEAPEVKYEADSKDYYTLIFTDPDAPSRKNPKSREWNHWLVVNIPGSKILEGEVITDYVGSAPPKGSGLHRYVFVLYKQPEKLKVDEPRHGPTDGNRGQFSTEKFAKKYNLGKAVGGNFFQAQWDDSVPASHKKLGF

SEQ ID NO: 891 - protein, 178 aa, Limulus polyphemus
MEENEIVPDVLDVTPTHLLEVKYGDDEVNLGNELTPTQVKDPPTYINYPFEANDFYTLCMTDPDAPSRQNPKFREWHHWLVVNIPGKDICKGEVLSDYIGSAPPKGTGLHRYVFVVYKQPECLNPTEKQLTNTSGKHRGNFKIRDFAAKYDLGDPWAGNFYQAEWDEYVPKLYEQLSN

SEQ ID NO: 892 - protein, 218 aa, Limulus polyphemus
MQLMLNKVFLCVFSVCLLFVTAETSCNRSKSLRSARVRKVMEENEIVPDVLDVTPTHLLEVKYGDDEVNLGNELTPTQVKDPPTYINYPFEANDFYTLCMTDPDAPSRQNPKFREWHHWLVVNIPGKDICKGEVLSDYIGSAPPKGTGLHRYVFVVYKQPECLNPTEKQLTNTSGKHRGNFKIRDFAAKYDLGDPWAGNFYQAEWDEYVPKLYEQLSN

SEQ ID NO: 893 - protein, 178 aa, Limulus polyphemus
MEEYGVIPDVIDTVPPNVLEVNYGSYEVKLGNELTPTQVKDPPTRINYPVEDNALYTLCMTDPDAPSRQNPKFREWHHWLVVNIPGSEVDKGEVMSQYIGSGPPKGTGLHRYIFVVYKQPGHLNPTEKRLSNNSGQHRGNFKIRDFAKKYNLGQPVAGNFYQAQWDDYVPKLYEQLSN

SEQ ID NO: 894 - protein, 208 aa, Limulus polyphemus
MVSLRYLKTKNTGSLSARNCFTLCSSSTEDMEENDIIPDVIDTIPVHVMTVKYDDCEVDLGNELTPTQVKDPPTFIEYPTEDDTLYTLCMTDPDAPSRQNPKFREWHHWLVVNIPGNNISEGDVLSEYVGSGPPKGTGLHRYVFLVYKQPECLSPTEKRLTNTSGEHRGLFRIRDFAAKYELGEPWAGNFYQAQWDSYVPKLYEQLSN

SEQ ID NO: 895 - protein, 204 aa, Limulus polyphemus
MVSLRYLKTKNTARNCFTLCSSSTEDMEENDIIPDVIDTIPVHVMTVKYDDCEVDLGNELTPTQVKDPPTFIEYPTEDDTLYTLCMTDPDAPSRQNPKFREWHHWLVVNIPGNNISEGDVLSEYVGSGPPKGTGLHRYVFLVYKQPECLSPTEKRLTNTSGEHRGLFRIRDFAAKYELGEPWAGNFYQAQWDSYVPKLYEQLSN

SEQ ID NO: 896 - protein, 182 aa, Linepithema humile
MAQDLKKHGVIPDVVDKVPESVLNVTYPDNITVEIGKELTPTQVKDEPNVKWSGKDNKFYTLCMTDPDAPSRKEPKFREWHHWLVGNIPGTDVSKGEVLSAYIGSGPPEKTGLHRYVFLVYEQPDKINFTEKRLTNRSGDNRGKFSIRNFAAKYKLGDPIAGNMYQAEYDDYVPKLYEQLKG

SEQ ID NO: 897 - protein, 206 aa, Linepithema humile
MSLCLLTARITSTLSQVGTRLLSSMAQDLKKHGVIPDVVDKVPESVLNVTYPDNITVEIGKELTPTQVKDEPNVKWSGKDNKFYTLCMTDPDAPSRKEPKFREWHHWLVGNIPGTDVSKGEVLSAYIGSGPPEKTGLHRYVFLVYEQPDKINFTEKRLTNRSGDNRGKFSIRNFAAKYKLGDPIAGNMYQAEYDDYVPKLYEQLKG

SEQ ID NO: 898 - protein, 214 aa, Linepithema humile
MLLRHGIVLFFASLCLGITSTLSQVGTRLLSSMAQDLKKHGVIPDVVDKVPESVLNVTYPDNITVEIGKELTPTQVKDEPNVKWSGKDNKFYTLCMTDPDAPSRKEPKFREWHHWLVGNIPGTDVSKGEVLSAYIGSGPPEKTGLHRYVFLVYEQPDKINFTEKRLTNRSGDNRGKFSIRNFAAKYKLGDPIAGNMYQAEYDDYVPKLYEQLKG

SEQ ID NO: 899 - protein, 207 aa, Lucilia cuprina
MTFKVVLALCLLGLIVNTVKAKDSEITKFMKHLEVIPDVIEEGPKDFLKITYDNGIQADKGVELTPTQVKNQPKIEWQAEAGTYYTLIMTDPDAPSRKEPTIREWHHWLVGNIPGDNLSKGEVLSEYVGSGPPKDSGLHRYTFLLFKQPKKLEFDEKHLTKTQAAGREKFSTKNFIKKYNLGVPIAGNFYQAQYDDYVLELYKQLGL

SEQ ID NO: 900 - protein, 263 aa, Lucilia cuprina
MFVRLSRCATKTTKAFIKYHAAATPAQTQQHQIVLSKSRSFLLAVRSYHCCSQKISSTLPVCLSKSSANISVAIKRDFAKMSLKSFQEHEVVPDVIDTAPTEVLSVTYGDLQVKEGNVLTPTQVQNKPQLSWNADANALYTVCMTDPDAPSRKEPTFREWHHWLVVNVPGSKVSDGEVLSDYIGSGPPQGTGLHRYVFLVYKQPSKLSCDEKRLPDNSGDGRGGFKIAAFAKKYQLGNPIAGNFYQAEWDDYVPKLYAKLEGK

SEQ ID NO: 901 - protein, 466 aa, Lucilia cuprina
MAFRFTSFLAVGCLLLAASAPLNAAAIDNSVAEPRIHTSDELISNIVDNCFNSNAMHCLKEKVLTYLDTVTGVEEDVSGRAFNDDVIDKVITDRVARILNTNEIRVTLPETVFANSVLSYRADRGFDLEIPQSEARGDKKKDKLFLPLLLLMKLKLKVVMPILMSLIGLKAFKALILSKIAIKLVLGFLIYNLIQKLGGMKMTMMPMMPPMPAAEYGVPSSTASSYDPSSWEPMSGGPYARSDAQYMAYSSYHPSSSSSYSGSSSTALCLLGLIVNTVKAKDSEITKFMKHLEVIPDVIEEGPKDFLKITYDNGIQADKGVELTPTQVKNQPKIEWQAEAGTYYTLIMTDPDAPSRKEPTIREWHHWLVGNIPGDNLSKGEVLSEYVGSGPPKDSGLHRYTFLLFKQPKKLEFDEKHLTKTQAAGREKFSTKNFIKKYNLGVPIAGNFYQAQYDDYVLELYKQLGL

SEQ ID NO: 902 - protein, 219 aa, Marmota marmota marmota
MKLATAALLLGFVMVAAGEEEEENDPCVYENLPYEDTGLCKGLDVFYPEVGNVACMFIPDCNNFRHKITYWMEPIVKFPRALEGATYTLMMVDPDAPSRSEPTKRYWRHWLVTDIKGNDIKKGNIQGQVLTPYKPPSPPANSGFHRYQLLVYLQERNEVLSLLPSESKSRGSWNMESFLNRFHLREPEASTQFMTQNSHDSPMIQAFRGDVRYFKDKPK

SEQ ID NO: 903 - protein, 182 aa, Melipona quadrifasciata
MAQQLQTHGVVPDVIDKVPTNVLQVTYPNNLAVEIGKVLTPTQVKDLPTVKWDGDANTFYTLCMTDPDAPSRKEPKFREWHHWLIGNIPGSDVSKGEVLSEYVGSGPPKGTGLHRYVFLLYKQPQKLTFDEPRLTNRSGDNRANFSIRKFAAKYKLGDPIAGNMYQAEFDDYVPLLYKQLGG

SEQ ID NO: 904 - protein, 181 aa, Musca domestica
MDAGGIIPDIIDTKPGTVAKVVYPGDVKVELGKELTPTQVKDTPEVTWEADDNSLYTLLMVDPDAPSRQEPSYREALHWLVINIPGNKVSKGQVVAEYIGSGPPEGTGLHRYVFLVFKQEENISTDKFITRTSLEGRLNVKTRDYIAKYKLGDPIAGNYYEAKYDDFVPSLMSQFKSNDHV

SEQ ID NO: 905 - protein, 209 aa, Nasonia vitripennis
MFVISLGATSLIAKRPLLNIGARFLATMADALKTHEVIPDVIDTVPPAIVKVSYPSGVSVDIGKELTPTQVKDQPSVEWDADSSSYYTLCMTDPDAPSRKDPKFREWHHWLVTNIPGKDVSKGDVLSDYIGSGPPPDTGLHRYVFLVYKQPSKITFDEKRLTNRSGDGRNNFSIKKFAQKYNLGNPIAGSMYQAAFDDYVPKLYKQLEG

SEQ ID NO: 906 - protein, 213 aa, Necator americanus
MRHRYFFTVFVILLKSGLYNSEESEYLHPGLPQLDITCEGGVKIAVGNELSPKSCPTKPTLNWNSSPNELYTVIMMDPDAPSRKDPFLRDYLHWLVVNIPGSHVRNGNELMPFMRPRPPSGAGFHRYHVLLYKQPGKISAKEVEARAHFDTLKFAMENKIGKPIAGNFFKVRKKTRVENSLTSICKHEERDLRMSLYIPKIVFRWGEVSDRLI

SEQ ID NO: 907 - protein, 184 aa, Nilaparvata lugens
MATKSQDPQAFYDKFKVAIEDIADNLDPDACVATVKYANVEADVGNELTPKDTKVQPNVEWNAKPDKFYTLLMSDPDAPSRKDPRFREWQHWLIVNIPGNDISKGESLTDYIGPGPPKGTGLHRYIFLIFEQPDKIKFDEQYKGVSDRVQRKSFNTRKFIDKYKLGPIIAGNYFEAQWDSSVGS

SEQ ID NO: 908 - protein, 198 aa, Nilaparvata lugens
MLSALFLFLAVTTVASAKSQDPQAFYDKFKVAIEDIADNLDPDACVATVKYANVEADVGNELTPKDTKVQPNVEWNAKPDKFYTLLMSDPDAPSRKDPRFREWQHWLIVNIPGNDISKGESLTDYIGPGPPKGTGLHRYIFLIFEQPDKIKFDEQYKGVSDRVQRKSFNTRKFIDKYKLGPIIAGNYFEAQWDSSVGS

SEQ ID NO: 909 - protein, 205 aa, Nilaparvata lugens
MIVSMSQQVLVYCVITFAFLLLPAKSQDPQAFYDKFKVAIEDIADNLDPDACVATVKYANVEADVGNELTPKDTKVQPNVEWNAKPDKFYTLLMSDPDAPSRKDPRFREWQHWLIVNIPGNDISKGESLTDYIGPGPPKGTGLHRYIFLIFEQPDKIKFDEQYKGVSDRVQRKSFNTRKFIDKYKLGPIIAGNYFEAQWDSSVGS

SEQ ID NO: 910 - protein, 178 aa, Onthophagus taurus
MEKGGVVPDVIDTAPKTSLEVLYANNVKVDGGNELTPTKVKDVPNVKWQAEEGSYYTLIMTDPDAPSRTNPKMREWHHWLVGNIPGNDIKKGTTLSEYIGSAPPKDSGLHRYVLLVFKQPGKVEFSEDKLTNKSGKGRGKFNTKSFAQKYNLGNPIAGNFFKAQWDNYVPTIYKQLSG

SEQ ID NO: 911 - protein, 204 aa, Onthophagus taurus
MLIRATILLIVTLLARYSSTTDITSLMEKGGVVPDVIDTAPKTSLEVLYANNVKVDGGNELTPTKVKDVPNVKWQAEEGSYYTLIMTDPDAPSRTNPKMREWHHWLVGNIPGNDIKKGTTLSEYIGSAPPKDSGLHRYVLLVFKQPGKVEFSEDKLTNKSGKGRGKFNTKSFAQKYNLGNPIAGNFFKAQWDNYVPTIYKQLSG

SEQ ID NO: 912 - protein, 216 aa, Orchesella cincta
MGVTDRNKLILATFFFLAVSLWNNFATATKPQPTGIEEMEKEQIVPEVIDTAPKSVLNVTYGKLEVKLGNSLTPTQVKSPPTITWNADPKKLYLLCMTDPDAPSRQEPKFREWHHWLVGNIPGTEIAKGETLSEYIGSGPPEGTGLHRYIFLIYEQPEKLTFDEKRLTNRSGDGRGKFSIRNFAKKYNLGQPIAGNFYQAEWDDYVPKLYEQLSGK

SEQ ID NO: 913 - protein, 208 aa, Pediculus humanus corporis
MRFLLLTGGKLLRGFAECPKRRFCNVATMEKFEIVPDVVKVAPAEVAEIKYGNLALSLGNELTPTQVKNPPSVLKWKAEEDSFYTLCMTDPDAPSRKDPKFREWHHWLVVNIPGTDVNKGETLSEYVGSGPPKGTGLHRYVYLIYKQNGKIETSKLRKLTNKSGDHRGKFSIQKFSEEHNLGNPIAGNFYQAQWDDYVPHLYKQLEGK

SEQ ID NO: 914 - protein, 226 aa, Sorex araneus
MGWTVRLAAVALSWGLMLVATTDTDEDDSCVYEALSDSDAVICKGLSVVYPELGNIGCMFVPDCNNYRQKITQWPQPMVSFSKAVEVASYILVMVDPDVPSRSSPDAQFWRHWLVVGIKGVDLKKGHIRGIELTGYRPPSPPKKTGFHRYQFFVYLQKEKSISLLPKENKTRASWKLDEFLNRYAFGEPEASTQFMTQNFQDSPSFWTPAGGDAHKHKSKLKPQPH

SEQ ID NO: 915 - protein, 206 aa, Stomoxys calcitrans
MTFKVLLAICLVSGLAAVNAEDSEITKFMKHLEVIPDVLDEGPKHFLKITYDNGILADKGVELTPTQVKNQPKIEWQAEAGTYYTLIMTDPDAPSRKEPTMREWHHWLVGNIPGDQLNKGEVLTEYVGSGAPKDTGLHRYTFLLFKQPKKLEFDEKRLTKNQGAGRENFSTRKFCEKYKLGEPLAGNFFQAQYDDSVPGLYKQLGF

SEQ ID NO: 916 - protein, 271 aa, Toxocara canis
MFLANNFAVLTVLLWFPGVVIPQQPTPPPGCVDRASNCRQLASTCYTRPYSQLMQRRCSRTCFTCDCIDTANDCAAFLGLCDNPVYDTALRARCQSTCGLCAGCGFRRHQIVPDVIGNAPSRRVRAFFNNTLEVTCGNELRPSQVRNPPTVGWDANSNVLYTLILTDPDAPSRQNPTLREWLHWLVINIPGNNTSRGNVIATFIPSGPPQGTGLHRYVFLVFSQPGNITNPGIGPLPNATGRPNFNTNAFVTRNNLGFAYAGNFYQSQFEG

SEQ ID NO: 917 - protein, 178 aa, Tribolium castaneum
MEKHGVVPDVVDVAPETTAEVTYPSGVKVEMGNELTPTQVKDVPTVKWNADNNALYTLCMTDPDAPSRKEPKFREWHHWLVGNIPGGNVGQGETLSAYVGSGPPEGTGLHRYVFLIYKQSGKINFDEKRLPNTSGDNRGCFSIRKFAEKYKLGQPVAGNFYQAQWDDYVPILYKQLGG

SEQ ID NO: 918 - protein, 198 aa, Tribolium castaneum
MFALRRPVYSSRFFSSVAKNMEKHGVVPDVVDVAPETTAEVTYPSGVKVEMGNELTPTQVKDVPTVKWNADNNALYTLCMTDPDAPSRKEPKFREWHHWLVGNIPGGNVGQGETLSAYVGSGPPEGTGLHRYVFLIYKQSGKINFDEKRLPNTSGDNRGCFSIRKFAEKYKLGQPVAGNFYQAQWDDYVPILYKQLGG

SEQ ID NO: 919 - protein, 222 aa, Tribolium castaneum
MTTTAGIFLSFLQLVIVFWKDLSKMFALRRPVYSSRFFSSVAKNMEKHGVVPDVVDVAPETTAEVTYPSGVKVEMGNELTPTQVKDVPTVKWNADNNALYTLCMTDPDAPSRKEPKFREWHHWLVGNIPGGNVGQGETLSAYVGSGPPEGTGLHRYVFLIYKQSGKINFDEKRLPNTSGDNRGCFSIRKFAEKYKLGQPVAGNFYQAQWDDYVPILYKQLGG

SEQ ID NO: 920 - protein, 233 aa, Tribolium castaneum
MLPFSNNRCQPMTTTAGIFLSFLQLVIVFWKDLSKMFALRRPVYSSRFFSSVAKNMEKHGVVPDVVDVAPETTAEVTYPSGVKVEMGNELTPTQVKDVPTVKWNADNNALYTLCMTDPDAPSRKEPKFREWHHWLVGNIPGGNVGQGETLSAYVGSGPPEGTGLHRYVFLIYKQSGKINFDEKRLPNTSGDNRGCFSIRKFAEKYKLGQPVAGNFYQAQWDDYVPILYKQLGG

SEQ ID NO: 921 - protein, 178 aa, Tribolium castaneum
MEKHGVVPDVVSVVPKHVAEVHYPKGVKVQLGNTLTPTQVKDPPTVKWEAESDAFYTLCMTDPDAPSRKDPKFREWHHWLVVNIPGDSIEKGEVLSGYIGSGPPKGSGLHRYVFVNYKQKGKISCNEKRLPSNSGDGRGKFSIKKFAEKYQLGEPLAGNFFQAEWDDYVPTLYKKLGM

SEQ ID NO: 922 - protein, 209 aa, Trichogramma pretiosum
MRKFYETALLVFCATIVFVLAAADDDDLEKRYMDFEVIPDVIDKTPMSLLQVTFNDKDVGFADELKPREVKDEPQVGWQLDSNKLYTLLLTDPDAPSREDKKWREVLHWAVVNIPGNDFSKGETLADYMSSGPPEGSGLHRYVFAVYEQPSKLDVDEKHIDKTRVPERLSFSSKKFTEKYNLGLIVAGNMYQAQFDDYVPELYETLKWE

SEQ ID NO: 923 - protein, 209 aa, Trichomalopsis sarcophagae
MNLLFTIAASLIAKRPLLNIGARFLATMADALKTHEVIPDVIDTVPPAIVKVSYPSGVSVDIGKELTPTQVKDQPSVEWDADSSSYYTLCMTDPDAPSRKDPKFREWHHWLVTNIPGKDVSKGDVLSDYIGSGPPPDTGLHRYVFLVYKQPSKITFDEKRLTNRSGDGRNNFSIKKFAQKYNLGNPIAGNMYQAAFDDYVPKLYKQLEG

SEQ ID NO: 924 - protein, 185 aa, Wuchereria bancrofti
MSVEEAFKKHQVVPDVISMVPTKLINVDYSGGIKVNLGNELTPTQVKDEPKVSWDAEAKSLYTLVMTDPDAPSRLNPKFREWHHWLVANIPGQDVSKGDVFSEYIGSGPPKGTGLHRYVFLVYKQPEKIVDVQHGHLTNKSGKNRANFKIAKFAEKHKLGNPIAGNFYQAQYDNYVPKLYEQLSD

SEQ ID NO: 925 - protein, 205 aa, Zeugodacus cucurbitae
MLNVKYLLLLSLFSMAHAADSDITKFMKHLEVIPDLITEGPKDFLNVNYDSGVVADKGVELTPTQVKHQPKVEWTSESADTYYTLIMTDPDAPSRAKPEMREWHHWLVVNIPGNALDKGEVLSEYIGSGAPKDTGLHRYVFLLYKQPKKLEFSEIHLTNTSAKGREKFSTKNFADKYGLGIPVAGNFFQAQYDEYVPELYKQLGF

SEQ ID NO: 926 - protein, 205 aa, Zeugodacus cucurbitae; identical to SEQ ID NO: 925

SEQ ID NO: 927 - protein, 178 aa, Zootermopsis nevadensis
MEKNGVVPDVIDTAPSAKLEVSYGSEKVDDGNELTPTKVKDPPTVNWGADDGSYYLLCMTDPDAPSRKDPKFREWHHWLVGNIPGNDVSQGETLSEYVGSGPPKGTGLHRYVFLVYKQPGKITYDEPRLTNRSGDNRGKFSVRDFAKKHNLGNPIAGNFYQAQWDDYVPKLYEQLDGK

SEQ ID NO: 928 - protein, 199 aa, Zootermopsis nevadensis
MIARRPILNILSRLLSTVPKTMEKNGVVPDVIDTAPSAKLEVSYGSEKVDDGNELTPTKVKDPPTVNWGADDGSYYLLCMTDPDAPSRKDPKFREWHHWLVGNIPGNDVSQGETLSEYVGSGPPKGTGLHRYVFLVYKQPGKITYDEPRLTNRSGDNRGKFSVRDFAKKHNLGNPIAGNFYQAQWDDYVPKLYEQLDGK

SEQ ID NO: 929 - protein, 153 aa, Acidobacteria bacterium
MEFKLSSAAFADGADIPARHTCDGEDLSPRLTWKGTPPGTRSLALVMDDPDAPRGTFTHWVVYDLPSDLTELGEGSTQGIQGRNSFGRSGYGGPCPPSGDRPHRYRFTLHALDVPTIALEHGTREQLEAKIDTHVLGTALLVGRYQRQPVRTH

SEQ ID NO: 930 - protein, 176 aa, Actinomyces
MDLTRPQAPDPYKLMPKAASFTLTSADLKEGEPMASAQCAEGGNTSPQLAWEGFPQGTESFLVTCFDPDAPTPSGFWHWVITDIPAATTELEAGVGASDLHLDGPAMHLRNDAGEHCYYGPLPPKGDGPHRYYFVVTALDTPSLELDEDATPTSAVFTANSHTLARAVLMATHETK

SEQ ID NO: 931 - protein, 176 aa, Actinomyces nasicola
MNLSRPIAPEPYEMLPEVPSFTLTSTEIRDGDTMPDAQVAEGGNTSPQLSWSGFPKDTKSFAVTCFDPDAPTPAGFWHWTVLDIPAETTELLAGAGTSDLELDGAAFHVRNDGGGHSYMGAAPPKGDREHRYIFAVHALDVDTLDLDENASPTVAAFTMLFHTLARATLTVTYQNT

SEQ ID NO: 932 - protein, 176 aa, Actinomyces nasicola
MNLSRPVAPEPYEMLPEVPAFSVTSTDIRDGQTMPDDQTQSGGNISPHLSWSGFPKETKSFAVTCFDPDAPTPAGFWHWTILDIGAKTTELATGAGASDLDLDGAAFHVRNDGGEHSYMGAAPPAGDRAHRYIFAIHALDTETLDLDEDATPTVAAFTMLFHTLARATLTVTYQQK

SEQ ID NO: 933 - protein, 158 aa, bacterium G20
MDNKATARSQLGLSSPVFRDGANIPIPYTCKGSNVSPPLNITGVPRAAQSLALIMHDPDAVSGDFIHWLMWDIPVSTQAIITISVPVGAVQGVNNAGQSKYMGPCPPAGTGTHRYIFELYALDKTLGLPAGADRDQLQKSMAGHILAQHTLTGLFSAD

SEQ ID NO: 934 - protein, 153 aa, bacterium HR13
MKVESPSFKNGEVIPQKYTCDGENVSPPIAWSGFPEGTKSFALIVDDPDAPIGTFTHWVVYDIPANIVSLKENFPKSKQVDSIKQGINDFGRVGYGGPCPPPRHGYHRYFFKVYALNVESLGLPPGATKKEVESKMRGHILSEGQMMGRYRRD

SEQ ID NO: 935 - protein, 177 aa, Brevibacterium
MSVNSPFYNLSDVPSFTLTSTDIEAGGELTGPQLSGAMGVDGGQDVSPQLSWSGFPEETKAFAVTCYDPDAPTGSGFWHWVVTDLDASTTSLPANAGDPSADLLPAGTVTLRNDAGEPRFVGAAPPQGHGPHRYFFIVTALAEPLGLDESASPAFAGFNMFFKGIARASLECTFELK

SEQ ID NO: 936 - protein, 177 aa, Brevibacterium antiquum
MSINSPFYNLSDVPTFTLTSTDIENGGKLSGPQLSGAMGVEGGQDTSPQLSWSGFPEETKAFAVTCYDPDAPTGSGFWHWVVTDLDASTTSLPANAGDPSADLLPAGSVTLRNDAGEPRFVGAAPPQGHGSHRYFFIVTALAEPLGLDESASPAFAGFNMFFKGIARAWLECTFELK

SEQ ID NO: 937 - protein, 177 aa, Brevibacterium aurantiacum
MSVNSPFYNLSDVPSFTLTSTDIEAGGELTGPQLSGAMGIDGGQDVSPQLSWSGFPEETKAFAVTCYDPDAPTGSGFWHWVVTDLDASTTSLPANAGDPSADLLPAGTVTLRNDAGEPRFVGAAPPQGHGPHRYFFIVTALAEPLGLDESASPAFAGFNMFFKGIARASLECTFELK

SEQ ID NO: 938 - protein, 177 aa, Brevibacterium aurantiacum
MSVNSPFYNLSDVPSFTLTSTDIEAGGELTGPQLSGAMGVDGGQDVSPQLSWWGFPEETKAFAVTCYDPDAPTGSGFWHWVVTDLDASTTSLPANAGDPSADLLPAGTVTLRNDAGEPRFVGAAPPQGHGPHRYFFIVTALAEPLGLDESASPAFAGFNMFFKGIARASLECTFELK

SEQ ID NO: 939 - protein, 177 aa, Brevibacterium sandarakinum
MSANSPFYNLSDVPTFTLTSTDIENGAELTGPQLSGAMGVDGGQDASPQLSWSGFPAETKAFAVTCYDPDAPTGSGFWHWVVTDLDASTTSLPTNAGDPSADLLPAGTVTLRNDAGEPRFVGAAPPQGHGPHRYFFIVTALAEPLGLDESASPAFAGFNMFFKGIARAWLECTFELK

SEQ ID NO: 940 - protein, 158 aa, Candidatus Giovannonibacteria bacterium GW2011_GWC2_44_8
MTNDSSNTDLKLTSQVFAEGAPIPVQYTCKDQNISPPLNIMGVPPQAKSLALIMHDPDAVSGDFVHWLVWDIPSTTQTIAVNSVPPDAIQGTNSANKSQYIGPCPPAGTGTHRYMFELYALDMPLTNLNMETNREQLQKAMEGHILAQHTLTGLFSAD

SEQ ID NO: 941 - protein, 158 aa, Candidatus Saccharibacteria bacterium RIFCSPHIGHO2_01_FULL_49_21
MSEPSAQESSLNLTSSVFKENDTIPAKYTCRGENISPPLAISDVPSGSKSLALIMHDPDAVSGDFVHWVTWNLPPSTSDFPEGNAPSGATQGKNSAGRNGYMGPCPPVGTGTHHYMFELYALDEILDLDDGTDREELEAAMEDHVLAKVTLTGLFSAQ

SEQ ID NO: 942 - protein, 159 aa, Candidatus Saccharibacteria bacterium RIFCSPHIGHO2_12_FULL_47_16b
MDNQPPATSTSLALSSSAFSDNQPIPVQYTCKGENVNPPLAISDVPAEAKALALIVHDPDAVSGDFVHWLMWDIPLATTSINANTVPVGAVQGQNDGGQSQYMGPCPPASTGTHRYMFKLYALDTILNLPAGSERPVLEQAMQGHVLAKTTLTGLFASQ

SEQ ID NO: 943 - protein, 159 aa, Candidatus Saccharibacteria bacterium RIFCSPHIGHO2_12_FULL_47_17
MDNQSKPTISTLALSSTAFNDNQPIPTQFSCKGENVNPPLAVTGAPTEAKALALIVHDPDAVSGDFTHWLIWDLPTSTTAINANSVPVGAVQGQNDGGQNKYMGPCPPTGTGTHRYMFELYALDSVLNLPAGSDRSTLEKAMESHTLAKTTLTGFFNAD

SEQ ID NO: 944 - protein, 158 aa, Candidatus Saccharibacteria bacterium RIFCSPLOWO2_01_FULL_49_22
MSEPSAQESSLNLTSSVFKENDTIPAKYTCRGENISPPLAISDVPSGSKSLALIMHDPDAVSGDFVHWVTWNLPPSTSDFPEGNAPSGATQGKNSAGRNGYMGPCPPVGTGTHHYMFELYALDEILDLDDGTDREELEAAMEDHMLAKVTLTGLFSAQ

SEQ ID NO: 945 - protein, 155 aa, Chelativorans sp. J32
MPLSLLSPSFADGKRIPDKYTRDQENLSPPLRWTGAPAGAQSFVLVLDDPDAPSGTFGHWGLFNIPADWDRLPESVETGPDKGSLRICRNDFGNNHYDGPQPPRGGGVHRYHFRLAALSLPSLNLPPISSVEDLWRAAEKHRLEEAILIGTYSRD

SEQ ID NO: 946 - protein, 147 aa, Chloroflexi bacterium RBG_16_52_11
MAIQLTSKAFTEGDNIPKRFTCDGTNTSPQLAWTGIPNGSKSLALIMDDPDAPGRTFVHWVLYDLPPDLIELAEGYKGVGVAGVNSYRKTSYNGPCPPPGSTHRYYFKLYALDAALNLSSGSTKEDIEKAMQGHILAWGQLMGKYGR

SEQ ID NO: 947 - protein, 180 aa, Corynebacterium kutscheri
MSSYIDPRFPGADPYAPLKKLPIFELTSTTFANGAEIPVPQAAPHNVSPALSWSQLPAGTKSIAITCFDPDAPTAAGFWHWAVFNIPVDITEVAEGAGSQKNLGINNAIALRGDSGQRTYYGPQPPQGHGPHRYLFAVHAVDVEKLDISPDATPAVLGFNLYFHSLGRAIHWGWYENPTE

SEQ ID NO: 948 - protein, 177 aa, Deltaproteobacteria bacterium GWA2_55_10
MKTAFLVIGFLLALTFNSYGGERVFRIESPDFKEGGPIPKKFTCEGENLSPQIKWGEPPEGTKSYALVVEDPDAPMGTFVHWVVFDLPSDVRELERGVGSNGAGSNGIKQGLTDFGQTGYGGPCPPKGHGRHRYNFVLKALDVPSLELPDGAKKSEIERATRGHVLAETRLTGIFQR

SEQ ID NO: 949 - protein, 154 aa, Deltaproteobacteria bacterium GWA2_55_82
MFQLDSPDFNEGAPIPKKFSCEGENVSPLIKWGKPPDGTKSYALIMEDPDAPMGTFVHWVVFDMPSELRELPRGTGNNEGSLNGMKQGLTDFGQAGYGGPCPPKGHGRHRYNFILRALDVPTLGLPDGAKKSEIERAMRSHVIAEAKLTGVFQR

SEQ ID NO: 950 - protein, 155 aa, Deltaproteobacteria bacterium GWB2_55_19
MGFIVISTDFKEGGRIPKANTCEGSDTSPAIQWEGAPAGTKALALIVEDPDAPMGTFIHWVVYDIPASSKSIERGAGSGGTLPPGAKHGSTGFGANRYNGPCPPKGHGDHRYYFILRALDKETLGLKEGASRAEVERAMRVHILAEAKTMGVYQR

SEQ ID NO: 951 - protein, 183 aa, Enterobacteriaceae
MKKLIVSSVLAFITFSAQAAAFQVTSNEIKTGEQLTTSHVFSGFGCEGGNTSPSLTWSGAPEGTKSFAVTVYDPDAPTGSGWWHWTVANIPATVTYLPTDAGRRDGTKLPTGAVQGRNDFGYAGFGGACPPKGDKPHHYQFKVWALKTDKIPVDSNSSGALVGYMLNANKIATAEITPVYEIK

SEQ ID NO: 952 - protein, 183 aa, Enterobacteriaceae
MKKLIVSSVLAFITFSAQAAAFQVTSNEIKTGEQLTTSHVFSGFGCEGGNTSPSLTWSGAPEGTKSFAVTVYDPDAPTGSGWWHWTVANIPATVTYLPADAGRRDGTKLPTGAVQGRNDFGYAGFGGACPPKGDKPHHYQFKVWALKTDKIPVDSNSSGALVGYMLNANKIATAEITPVYEVK

SEQ ID NO: 953 - protein, 183 aa, Enterobacteriaceae
MKKLIVSSVLAFITFSAQAAAFQVTSNEIKTGEQLTTSHVFSGFGCEGGNTSPSLTWSGAPEGTKSFAVTVYDPDAPTGSGWWHWTVANIPATVTYLPADAGRRDGTKLPTGAVQGRNDFGYAGFGGACPPKGDKPHHYQFKIWALKTDKIPVDSNSSGALVGYMLNANKIATAEIIPVYEVK

SEQ ID NO: 954 - protein, 183 aa, Enterobacteriaceae
MKTLIVSTVLAFITFSAQAAAFQVTSNEIKTGEQLTTSHVFSGFGCEGGNTSPSLTWSGVPEGTKSFAVTVYDPDAPTGSGWWHWTVVNIPATVTYLPVDAGRRDGTKLPTGAVQGRNDFGYAGFGGACPPKGDKPHHYQFKVWALKTEKIPVDSNSSGALVGYMLNANKIATAEITPVYEIK

SEQ ID NO: 955 - protein, 183 aa, Escherichia
MKKLIVSSVLAFITFSAQAAAFQVTSNEIKTGEQLTTSHVFSGFGCEGGNTSPSLTWSGAPEGTNSFAVTVYDPDAPTGSGWWHWTVANIPATVTYLPADAGRRDGTKLPTGAVQGRNDFGYAGFGGACPPKGDKPHHYQFKIWALKTDKIPVDSNSSGALVGYMLNANKIATAEIIPVYEVK

SEQ ID NO: 956 - protein, 183 aa, Escherichia coli
MKKLIVSSVMAFITFSAQAAAFQVTSNEIKTGEQLTTSHVFSGFGCEGGNTSPSLTWSGAPEGTKSFAVTVYDPDAPTGSGWWHWTVANIPATVTYLPTDAGRRDGTKLPTGAVQGRNDFGYAGFGGACPPKGDKPHHYQFKVWALKTDKIPVDSNSSGALVGYMLNANKIATAEITPVYEIK

SEQ ID NO: 957 - protein, 183 aa, Escherichia coli
MKKLIVSSVLAFITFSAQAAAFQVTSNEIKTGEQITTSHVFSGFGCEGGNTSPSLTWSGAPEGTKSFAVTVYDPDAPTGSGWWHWTVANIPATVTYLPTDAGRRDGTKLPTGAVQGRNDFGYAGFGGACPPKGDKPHHYQFKVWALKTDKIPVDSNSSGALVGYMLNANKIATAEITPVYEIK

SEQ ID NO: 958 - protein, 183 aa, Escherichia coli
MKKLIVSSVLAFITFSAQAAAFQVTSNEIKTGEQLTTSHVFSGFGCEGGNTSPSLTWSGAPEGTKSFAVTVYDPDAPTGSGWWHWTVANIPATVTYLPTDAGRRDGTKLPTGAVQGRNDFGYAGFGGACPPKGDKPHHYQFKVWALKTDKIPVDSNSSGALVGYMLNANKIAIAEITPVYEIK

SEQ ID NO: 959 - protein, 183 aa, Escherichia coli
MKKLIVSSVLAFITFSAQAAAFQVTSNEIKTGEQLTTSHVFSGFGCEGGNTSPSLTWSGAPEGTKSFAVTVYDPDAPTGSGWWHWAVANIPATVTYLPTDAGRRDGTKLPTGAVQGRNDFGYAGFGGACPPKGDKPHHYQFKVWALKTDKIPVDSNSSGALVGYMLNANKIATAEITPVYEIK

SEQ ID NO: 960 - protein, 183 aa, Escherichia coli
MKKLIVSSVLAFITFSAQAAAFQVTSNEIKTGEQLTTSHVFSGFGCEGGNTSPSLTWSGAPEGTKSFAVTVYDPDAPTGSGWWHWTVANIPATVTYLPTDAGRRDGTKLPTGAVQGRNDFGYAGFGGACPPKGDKPHHYQFKVWALKTDKIPVDSNSSGALVGYMLNANKFATAEITPVYEIK

SEQ ID NO: 961 - protein, 182 aa, Escherichia coli
MKKLIVSSVMAFITFSAQAAAFQVTSNEIKTGEQLTTSHVFSGFGCEGGNTSPSLTWSGAPEGTKSFAVTVYDPDAPTGSGWWHWTVANIPATVTYLPTDAGRRDGTKLPTGAVQGRNDFGYAGFGGACPPKGDKPHHYQFKVWALKTDKIPVDSNSSGALVGYMLNANKIATAEITPVYEI

SEQ ID NO: 962 - protein, 183 aa, Escherichia coli
MKKLIVSSVLAFITFSAQAAAFQVTSNEIKTGEQLTTSHVFSEFGCEGGNTSPSLTWSGAPEGTKSFAVTVYDPDAPTGSGWWHWTVANIPATVTYLPTDAGRRDGTKLPTGAVQGRNDFGYAGFGGACPPKGDKPHHYQFKVWALKTDKIPVDSNSSGALVGYMLNANKIATAEITPVYEIK

SEQ ID NO: 963 - protein, 183 aa, Escherichia coli
MKKLIVSSVLAFITFSAQAAAFQVTSNEIKTGEQLTTSHVFSGFGCEGGNTSPLLTWSGAPEGTKSFAVTVYDPDAPTGSGWWHWTVANIPATVTYLPTDAGRRDGTKLPTGAVQGRNDFGYAGFGGACPPKGDKPHHYQFKVWALKTDKIPVDSNSSGALVGYMLNANKIATAEITPVYEIK

SEQ ID NO: 964 - protein, 183 aa, Escherichia coli
MKKLIVSSVLAFITFSAQAAAFQVTSNEIKTGEQLTTSHVFSGFGCEGGNTSPSLTWSGAPEGTKSFAVTVYDPDAPTGSGWWHWTVANIPATVTYLPTDAGRRDGTKLPTGAVQGRNDFGYAGFGGACPPKRDKPHHYQFKVWALKTDKIPVDSNSSGALVGYMLNANKIATAEITPVYEIK

SEQ ID NO: 965 - protein, 183 aa, Escherichia coli
MKKLIVSSVLAFITFSAQAAAFQVTSNEIKTGEQLTTSHVFSGFGCEGGNTSPSLTWSGAPEGTKSFAVTMYDPDAPTGSGWWHWTVANIPATVTYLPADAGRRDGTKLPTGAVQGRNDFGYAGFGGACPPKGDKPHHYQFKVWALKTDKIPVDSNSSGALVGYMLNANKIATAEITPVYEIK

SEQ ID NO: 966 - protein, 183 aa, Escherichia coli
MKKLIVSSVLAFITFSAQAAAFQVTSNEIKTGEQLTTSHVFSGFGCEGGNTSPSLTWSGAPEGTKSFAVTVYDPDAPTGSGWWHWTVANIPATVTYLPTDAGRRDGTKLPTGAVQGRNDFGYAGFGGACPPKGDKPHHYQFKIWALKTDKIPVDSNSSGALVGYMLNANKIATAEIIPVYEVK

SEQ ID NO: 967 - protein, 183 aa, Escherichia coli
MKKLIVSSVLAFITFSAQAAAFQVTSNEIKTGEQLTTSHVFSGFGCEGGNTSPSLTWSGAPEGTKSFAVTVYDPDAPTGSGWWHWTVANIPATVTYLPADAGRRDGTKLPTGAVQGRNDFGYAGFGGACPPKGDKPHHYQFKIWALKTDKIPVDSNSSGALVGYMLNANKIATAEITPVYEVK

SEQ ID NO: 968 - protein, 183 aa, Escherichia coli
MKKLIVSSVLAFITFSAQAAAFQVTSNEIKTGEQLTTSHVFSGFGCEGGNTSPSLTWSGAPEGTKSFVVTVYDPDAPTGSGWWHWTVANIPATVTYLPADAGRRDGTKLPTGAVQGRNDFGYAGFGGACPPKGDKPHHYQFKVWALKTDKIPVDSNSSGALVGYMLNANKIATAEITPVYEIK

SEQ ID NO: 969 - protein, 183 aa, Escherichia coli
MKKLIVSSVLAFITFSAQAAAFQVTSNEIKTGEQLTTSHVFSGFGCEGGNTSPSLTWSGAPEGTKSFAVTVYDPDAPTGSGWWHWTVVNIPATVTYLPADAGRRDGTKLPTGAVQGRNDFGYAGFGGACPPKGDKPHHYQFKVWALKTDKIPVDSNSSGALVGYMLNANKIATAEITPVYEIK

SEQ ID NO: 970 - protein, 183 aa, Escherichia coli
MKKLIVSSVMAFITFSAQAAAFQVTSNEIKTGEQLTTSHVFSGFGCEGGNTSPSLTWSGAPEGTKSFAVTVYDPDAPTGSGWWHWTVANIPATVTYLPTDAGRRDGTKLPTGAVQGRNDFGYAEFGGACPPKGDKPHHYQFKVWALKTDKIPVDSNSSGALVGYMLNANKIATAEITPVYEIK

SEQ ID NO: 971 - protein, 183 aa, Escherichia coli
MKKLIVSSVLAFITFSAQAAAFQVTSNEIKTGEQLTTSHVFSGFGCEGGNTSPSLTWSGAPEGTKSFAVTVYDPDAPTGSGWWHWTVANIPATVTYLPTDAGRRDGTKLPTGAVQGRNDFGYAGFGGACPPKGDKPHHYQFKVWALKTDKIPVGSNSSGALVGYMLNANKIATAEITPVYEIK

SEQ ID NO: 972 - protein, 183 aa, Escherichia coli
MKKLIVSSVLAFITFSAQAAAFQVTSNEIKTGEQLTTSHVFSGFGCEGGNTSPSLTWSGAPEGTKSFAVTVYDPDAPTGSGWWHWTVANIPATVTYLPADAGRRDGTKLPTGAVQGRNDFGYAGFGGACPPKGDKPHHYQFKVWALKTDKIPVDSNSSGALVGYMFNANKIATAEITPVYEIK

SEQ ID NO: 973 - protein, 183 aa, Escherichia coli
MKKLIASSVLAFITFSAQAAAFQVTSNEIKTGEQLTTSHVFSGFGCEGGNTSPSLTWSGAPEGTKSFAVTVYDPDAPTGSGWWHWTVANIPATVTYLPADAGRRDGTKLPTGAVQGRNDFGYAGFGGACPPKGDKPHHYQFKVWALKTDKIPVDSNSSGALVGYMLNANKIATAEITPVYEIK

SEQ ID NO: 974 - protein, 183 aa, Escherichia coli
MKKLIVSSVLAFITFSAQAAAFQVTSNEIKTGEQLTTSHVLSGFGCEGGNTSPSLTWSGAPEGTKSFAVTVYDPDAPTGSGWWHWTVANIPATVTYLPADAGRRDGTKLPTGAVQGRNDFGYAGFGGACPPKGDKPHHYQFKVWALKTDKIPVDSNSSGALVGYMLNANKIATAEITPVYEIK

SEQ ID NO: 975 - protein, 183 aa, Escherichia coli
MKKLIVSSVLAFITFSAQAAAFQVTSNEIKTGEQLTTSHVFSGFGCEGGNASPSLTWSGAPEGTKSFAVTVYDPDAPTGSGWWHWTVANIPATVTYLPADAGRRDGTKLPTGAVQGRNDFGYAGFGGACPPKGDKPHHYQFKVWALKTDKIPVDSNSSGALVGYMLNANKIATAEITPVYEIK

SEQ ID NO: 976 - protein, 183 aa, Escherichia coli
MKKLIVSSVLAFITFSAQAAAFQVTSNEIKTGEQLTTSHVFSGFGCEGGNTSPSLTWSGAPEGTKSFAVTVYDPDAPTGSGWWHWTVANIPATVTYLPADAGRRDGTKLPTGAVQGRNDFGYAGFGGACPPKGDKPHHYQFKVWALKTDKIPVDSNSSGALVGYMLNANKIAAAEITPVYEIK

SEQ ID NO: 977 - protein, 183 aa, Escherichia coli
MKKLIVSSVLAFITFSAQAAAFQVTSNEIKTGEQLTTSHVFSGFGCEGGNTSPSLTWSGAPEGTKSFAVTVYDPDAPTGSGWWHWTVANIPATVTYLPTDAGRRDGSKLPTGAVQGRNDFGYAGFGGACPPKRDKPHHYQFKVWALKTDKIPVDSNSSGALVGYMLNANKIATAEITPVYEIK

SEQ ID NO: 978 - protein, 183 aa, Escherichia coli
MKKLIVSSVLAFITFSAQAAAFQVISNEIKTGEQLTTSHVFSGFGCEGGNTSPSLTWSGAPEGTKSFAVTVYDPDAPTGSGWWHWTVANIPATVTYLPADAGRRDGTKLPTGAVQGRNDFGYAGFGGACPPKGDKPHHYQFKVWALKTDKIPVDSNSSGALVGYMLNANKIATAEITPVYEIK

SEQ ID NO: 979 - protein, 183 aa, Escherichia coli
MKKLIVSSVLAFITFSAQAAAFQVTSNEIKTGEQLTTSHVFSGFGCEGGNTSPSLTWSGAPEGTKSFAVTVYDPDAPTGSGWWHWTVANIPATVTYLPADAGRRDGTKLPTGAVQGRNDFGYAGFGGACPPKGNKPHHYQFKVWALKTDKIPVDSNSSGALVGYMLNANKIATAEITPVYEIK

SEQ ID NO: 980 - protein, 183 aa, Escherichia coli
MKKLIVSSVLAFITFSAQAAAFQVTSNEIKTGEQLTTSHVFSGFGCEGGNTSPSLTWSGAPEGTKSFAVTVYDPDAPTGSGWWHWTVANIPATVTYLPTDAGIRDGTKLPTGAVQGRNDFGYAGFGGACPPKGDKPHHYQFKVWALKTDKIPVDSNSSGALVGYMLNANKIATAEITPVYEIK

SEQ ID NO: 981 - protein, 183 aa, Escherichia coli
MKKLIVSSVLAFITFSAQAAAFQVTSNEIKTGEQLTTSHVFSGFGCEGGNTSPSLTWSGAPEGTKSFAVTVYDPDAPTGSGWWHWTVANIPATVTYLPADAGRRDGTKLPTGAVQGRNDFGYAGFGGACPPKGDKPHHYQFKVWALKTDKIPVDSNSSGALVGYMLNTNKIATAEITPVYEIK

SEQ ID NO: 982 - protein, 183 aa, Escherichia coli
MKKLIVSSVLAFITFSAQAAAFQVTSNEIKTGEQLTTSHVFSGFGCEGGNTSPSLTWSGAPEGTKSFAVTVYDPDAPTGSGWWHWTVANIPATVTYLPADAGRRDGTKLPTGAVQGRNDFGYAGFGGACPPKGDKPHHYQFKVWALKTDKIPVDSNSSGALVGYMLNANKIATTEITPVYEIK

SEQ ID NO: 983 - protein, 183 aa, Escherichia coli
MKKLIVSSVLAFITFSAQAAAFQVTSNEIKTGKQLTTSHVFSGFGCEGGNTSPSLTWSGAPEGTKSFAVTVYDPDAPTGSGWWHWTVANIPATVTYLPADAGRRDGTKLPTGAVQGRNDFGYAGFGGACPPKGDKPHHYQFKVWALKTDKIPVDSNSSGALVGYMLNANKIATAEITPVYEIK

SEQ ID NO: 984 - protein, 183 aa, Escherichia coli
MKKLIVSSVLAFITFSAQAAAFQVTSNEIKTGEQLTTSHVFSGFGCEGGNTSPSLTWSGAPEGTKSFAVTVYDPDAPTGSGWWHWTVANIPATVTYLPADAGRRDGTKLPTGAVQGRNDFGYAGFGGACPPKGDKPHHYHFKVWALKTDKIPVDSNSSGALVGYMLNANKIATAEITPVYEIK

SEQ ID NO: 985 - protein, 183 aa, Escherichia coli
MKKLIVSSVLAFITFSAQAAAFQVTSNEIKTGEQLTTSHVFSGFGCEGGNTSPSLTWSGAPEGTKSFAVTVYDPDAPTGSGWWHWTVANIPATVTYLPADAGRRDGTKLPTGAVQGRNDFGYAGFGGACPPKGDKPHHYQFKIWALKTDKIPVDSNSSGALVGYMLNANKIATAEIIPVYEIK

SEQ ID NO: 986 - protein, 183 aa, Escherichia coli
MKKLIVSSVLAFITFSAQAAAFQVTSNEIKTGEQLTTSHIFSGFGCEGSNTSPSLTWSGAPEGTKSFAVTVYDPDAPTGSGWWHWTVANIPATVTYLPADAGRRDGTKLPTGAVQGRNDFGYAGFGGACPPKGDKPHHYQFKVWALKTDKIPVDSNSSGALVGYMLNANKIATAEITPVYEIK

SEQ ID NO: 987 - protein, 183 aa, Escherichia coli
MKKLIVSSVLAFITFSAQAAAFQVTSNEIKTGEQLTTSHVFSGFGCEGGNTSPSLTWSGAPEGTKSFAVTVYDPDAPTGSGWWHWTVANIPATVTYLPADAGRRDGTKLPTGAVQGRNDFGYAGFGGACSPKGDKPHHYQFKVWALKTDKIPVDSNSSGALVGYMLNANKIATAEITPVYEIK

SEQ ID NO: 988 - protein, 183 aa, Escherichia coli
MKKLIVSSVLAFITFSAQAAAFQVTSNEIKTGEQLTTSHVFSGFGCEGGNTSPSLTWSGAPEGTKSFAVTVYDPDAPTGSGWWHWTVANIPATVTYLPADAGRRDGTKLPTGAVQGRNDFGYAGFGGACPPKGDKPHHYQFKVWALKTDKISVDSNSSGALVGYMLNANKIATAEITPVYEIK

SEQ ID NO: 989 - protein, 183 aa, Escherichia coli
MKKLIVSSVLAFITFSAQAAAFQVTSNEIKTGEQLTTSHVFSGFGCEGGNTSPSLTWSGAPEGTKSFAVTVYDPDAPTGSGWWHWTVANIPATVTYLPADAERRDGTKLPTGAVQGRNDFGYAGFGGACPPKGDKPHHYQFKVWALKTDKIPVDSNSSGALVGYMLNANKIATAEITPVYEIK

SEQ ID NO: 990 - protein, 183 aa, Escherichia coli
MKKLIVSSVLAFITFSAQAAAFQVTSNEIKTGEQLTTSHVFSGFGCEGGNTSPSLTWSGAPEGIKSFAVTVYDPDAPTGSGWWHWTVANIPATVTYLPTDAGRRDGTKLPTGAVQGRNDFGYAGFGGACPPKRDKPHHYQFKVWALKTDKIPVDSNSSGALVGYMLNANKIATAEITPVYEIK

SEQ ID NO: 991 - protein, 183 aa, Escherichia coli
MKKLIVSSVLAFITFSAQAAAFQVTSNEIKTGEQLTTSHVFSGFGCEGGNTSPSLTWSGAPEGTKSFAVTVYDPDAPTGSGWWHWTVANIPATVTYLPADAGRRDGTKLPTGAVQGRNDFGYAGFGGACPPKGDKPHHYHFKVWALKTDKIPVDSNSSGALVGYMLNANKIATAEITPVYEVK

SEQ ID NO: 992 - protein, 183 aa, Escherichia coli
MKKLIVSSVLAFITFSAQAAAFQVTSNEIKTGEQLTTSHVFSGFGCEGGNTSPSLTWSGAPEGTKSFAVTVYDPDAPTGSGWWHWTVANIPATVTYLPADTGRRDGTKLPTGAVQGRNDFGYAGFGGACPPKGDKPHHYQFKIWALKTDKIPVDSNSSGALVGYMLNANKIATAEITPVYEVK

SEQ ID NO: 993 - protein, 183 aa, Escherichia coli
MKKLIVSSVLAFITFSAQAAAFQVTSNEIKTGEQLTTPHIFSGFGCEGGNTSPSLTWSGAPEGTKSFAVTVYDPDAPTGSGWWHWTVANIPATVTYLPADAGRRDGTKLPTGAVQGRNDFGYAGFGGACPPKGDKPHHYQFKVWALKTDKIPVDSNSSGALVGYMLNANKIATAEITPVYEIK

SEQ ID NO: 994 - protein, 183 aa, Escherichia coli
MKKLIVSSVLAFITFSAQAAAFQVTSNEIKTGEQLTTSHVFSGFGCEGGNTSPSLTWSGAPEGTKSFAVTVYDPDAPTGSGWWHWTVANIPATVTYLPADAGRRDGTKLPTGAVQGRNDFGYAGFGGACPPKGDKPHHYQFKIWALKTDKIPVDSNSSGALVGYMLNANKIATAEIKPVYEVK

SEQ ID NO: 995 - protein, 183 aa, Escherichia coli
MKKIIVSSVLAFITFSAQAAAFQVTSNEIKTGEQLTTSHVFSGFGCEGGNTSPSLTWSGAPEGTKSFAVTVYDPDAPTGSGWWHWTVANIPATVTYLPADAGRRDGTKLPTGAVQGRNDFGYAGFGGACPPKGDKPHHYQFKIWALKTDKIPVDSNSSGALVGYMLNANKIATAEIIPVYEIK

SEQ ID NO: 996 - protein, 183 aa, Escherichia coli
MKKLIVSSVLAFITFSAQAAAFQVTSNEIKTGEQLTTSHVFSGFGCEGGNTSPSLTWSGAPEGTKSFAVTVYDPDAPTGSGWWHWTVANIPATVTYLPADAGRRDGTKLPTGAVQGRNDFGYAGFGGACPPKGDKLHHYQFKVWALKTDKIPVDSNSSGALVGYMLNANKIATAEITPVYEIK

SEQ ID NO: 997 - protein, 183 aa, Escherichia coli
MKKLIVSSVLAFITFSAQAAAFQVTSNEIKTGEQLTTSHVFSGFGCEGGNTSPSLTWSGAPEGTKSFAVTGYDPDAPTGSGWWHWTVANIPATVTYLPADAGRRDGTKLPTGAVQGRNDFGYAGFGGACPPKGDKPHHYQFKVWALKTDKIPVDSNSSGALVGYMLNANKIATAEITPVYEIK

SEQ ID NO: 998 - protein, 183 aa, Escherichia coli
MKKLIVSSVLAFITFSAQAAAFQVTSNEIKTGEQLTTSHVFSGFGCEGGNTSPSLIWSGAPEGTKSFAVTVYDPDAPTGSGWWHWTVANIPATVTYLPADAGRRDGTKLPTGAVQGRNDFGFAGFGGACPPKGDKPHHYQFKVWALKTDKIPVDSNSSGALVGYMLNANKIATAEITPVYEIK

SEQ ID NO: 999 - protein, 183 aa, Escherichia coli
MKKLIVSSVLAFITFSAQAAAFQVTSNEIKTGEQLTTSHVFSGFGCEGGNTSPSLTWSGAPEGTKSFAVTVYDPDAPTGSGWWHWTVANIPATVTYLPADAGRRDGTKLPTGAIQGRNDFGYAGFGGACPPKGDKPHHYQFKIWALKTDKIPVDSNSSGALVGYMLNANKIATAEIIPVYEVK

SEQ ID NO: 1000 - protein, 183 aa, Escherichia coli
MKKLIVSSVLAFITFSAQAAAFQVTSNEIKTGEQLTTSHVFSGFGCEGGNTSPSLTWSGAPEGTKSFAVTVYDPDAPTGSGWWHWTVANIPATVTYLPADAGRRDGTKLPTGAVQGRNDFGYAGFGGACPPKGDKPHHYQFKIWALKTDKIPVDSNSSGALVGYMLNANKIATAEIIPIYEVK

SEQ ID NO: 1001 - protein, 183 aa, Escherichia coli
MKKLIVSSVLAFITFSAQAAAFQVTSNEIKTGEQLTTSHVFSGFGCEGGNISPSLTWSGAPEGTKSFAVTVYDPDAPTGSGWWHWTVANIPATVTYLPADAGRRDGTKLPTGAVQGRNDFGYAGFGGACPPKGDKPHHYQFKVWALKTDKIPVDSNSSGALVGYMLNANKIAAAEITPVYEIK

SEQ ID NO: 1002 - protein, 183 aa, Escherichia coli
MKKLIVSSVLAFITFSAQAAAFQVTSNEIKTGEQLTTSHVFSGFGCEGGNTSPSLTWSGAPEGTKSFAVTVYDPDAPTGSGWWHWTVANIPATVTYLPTDAGRRDGTKLPTGAVQGRNDFGYAGFGGACPPKGDKPHHYQFKIWALKTDKIPEDSNSSGALVGYMLNANKIATAEIIPVYEVK

SEQ ID NO: 1003 - protein, 183 aa, Escherichia coli
MKKLIVSSVLAFITFSAQAAAFQVTSNEIKTGEQLTTSHVFSGFGCEGGNTSPSLIWSGAPEGTKSFAVTVYDPDAPTGSGWWHWTVANIPATVTYLPADAGRRDGTKLPTGAVQGRNDFGFAGFGGACPPKGDKPHHYQFKVWALKTDKIPVDSNSSGALVGYMLNANKIATAEITPVYEVK

SEQ ID NO: 1004 - protein, 183 aa, Escherichia coli
MKKLIVSSVLAFITFSAQAAAFQVTSNEMKTGEQLTTSHVFSGFGCEGGNTSPSLTWSGAPEGTKSFAVTVYDPDAPTGSGWWHWTVANIPATVTYLPADAGRRDGTKLPTGAVQGRNDFGYAGFGGACPPKGDKPHHYQFKIWALKTDKIPVDSNSSGALVGYMLNANKIATAEIIPVYEVK

SEQ ID NO: 1005 - protein, 183 aa, Escherichia coli
MKKLIVSSVLAFITFSAQAAAFQVTSNEIKTGEQLTTSHVFSGFGCEGGNTSPSLTWSGAPEGTKSFAVTVYDPDAPTGSGWWHWTVANIPATVTYLPADAGRRDGTKLPTGAVQGRNDFGYAGFGGACPPKGDKPHHYQFKIWALKTDKIPVDSNSSGALVGYMLNANKISTAEIIPVYEVK

SEQ ID NO: 1006 - protein, 183 aa, Escherichia coli
MKKLIVSSVLAFITFSAQAAAFQVTSNEIKTGEQLTTSHVFSGFGCEGGNTSPSLTWSGAPEGTKSFAVTVYDPDAPTGSGWWHWTVSNIPATVTYLPADAGRRDGTKLPTGAVQGRNDFGYAGFGGACPPKGDKPHHYQFKIWALKTDKIPVDSNSSGALVGYMLNANKIATAEIIPVYEVK

SEQ ID NO: 1007 - protein, 183 aa, Escherichia coli
MKKLIVSSVLAFITFSAQAAAFQVTSNEIKTGEQLSTSHVFSGFGCEGGNTSPSLTWSGAPEGTKSFAVTVYDPDAPTGSGWWHWTVANIPATVTYLPADAGRRDGTKLPTGAVQGRNDFGYAGFGGACPPKGDKPHHYQFKIWALKTDKIPVDSNSSGALVGYMLNANKIATAEIIPVYEVK

SEQ ID NO: 1008 - protein, 183 aa, Escherichia coli
MKKLIVSSVLAFITFSAQAAAFQVTSNEIKTGEQLTTSHVFSGFGCEGGNTSPSLTWSGAPEGTKSFAVTVYDPDAPTGSGWWHWTVANIPATVTCLPTDAGRRDGTKLPTGAVQGRNDFGYAGFGGACPPKRDKPHHYQFKVWALKTDKIPVDSNSSGALVGYMLNANKIATAEITPVYEIK

SEQ ID NO: 1009 - protein, 183 aa, Escherichia coli
MKKLIVSSVLAFITFSAQAAAFQVTSNEIKTGEQLTTSHVFSGFGCEGGNTSPSLTWSGAPEGTKSFAVTVYDPDAPTGSGWWHWTVANIPATVTYLPADAGRRDGTKLPTGAVQGRNDFGYAGFGGACPPKGDKPHHYQFKIWALKTDKIPVDSNSSGALVGYMLNANKIATAEIIPVYDVK

SEQ ID NO: 1010 - protein, 183 aa, Escherichia coli
MKKLIVSSVLAFITFSAQAAAFQVTSNEIKTGEQLTTSHVFSGFGCEGGNTSPSLTWSGAPEGTKSFAVTVYDPDAPTGSGWWHWTVANIPATVTYLPADAGRRDGTKLPTGVVQGRNDFGYAGFGGACPPKGDKPHHYQFKIWALKTDKIPVDSNSSGALVGYMLNANKIATAEIIPVYEVK

SEQ ID NO: 1011 - protein, 183 aa, Escherichia coli
MKKLIVSSVLAFITFSAQAAVFQVTSNEIKTGEQLTTSHVFSGFGCEGGNTSPSLTWSGAPEGTKSFAVTVYDPDAPTGSGWWHWTVANIPATVTYLPADAGRRDGTKLPTGAVQGRNDFGYAGFGGACPPKGDKPHHYQFKIWALKTDKIPVDSNSSGALVGYMLNANKIATAEIIPVYEVK

SEQ ID NO: 1012 - protein, 183 aa, Escherichia coli
MKKLIVSSVLAFITFSAQAAAFQVTSNEIKTGEQLTTSHVFSGFGCEGGNTSPSLTWSGAPEGTKSFAVTVYDPDAPTGSGWWHWTVANIPATVTYLPADAGRRDGTKLPTGAVQGRNDFGYAGFGGACPPKGDKPHHYQFKIWALKTDKIPVDSNSSGALVGYMLNANKIVTAEIIPVYEVK

SEQ ID NO: 1013 - protein, 183 aa, Escherichia coli
MKKLIVSSVLAFITFSAQAAAFQVTSNEIKTGEQLTTSHVFSGFGCEGGNTSPSLTWSGAPEGTKSFAVTVYDPDAPTGSGWWHWTVANIPATVTYLPADAGRRDGTKLPTGAVQGRNDFGYAGFGGACPPKGDKPHHYQFKIWALKTDKIPVDSNSSGALVGYMLNTNKIATAEIIPVYEVK

SEQ ID NO: 1014 - protein, 183 aa, Escherichia coli
MKKLIVSSVLAFITFSAQAAAFQVTSNEIKTGEQLTTSHVFSGFGCEGGNTSPSLTWSGAPEGTKSFAVTVYDPDAPTGSGWWHWAVANIPATVTYLPADAGRRDGTKLPTGAVQGRNDFGYAGFGGACPPKGDKPHHYQFKIWALKTDKIPVDSNSSGALVGYMLNANKIATAEIIPVYEVK

SEQ ID NO: 1015 - protein, 183 aa, Escherichia coli
MKKLIVSSVLAFITFSAQAAAFQVTSNEIKTGEQLTTSHVFSGFGGEGGNTSPSLTWSGAPEGTKSFAVTVYDPDAPTGSGWWHWTVANIPATVTYLPADAGRRDGTKLPTGAVQGRNDFGYAGFGGACPPKGDKPHHYQFKVWALKTDKIPVDSNSSGALVGYMLNANKIATAEITPVYEIK

SEQ ID NO: 1016 - protein, 183 aa, Escherichia coli
MKKLIVSSVLAFITFSAQAAAFQVTSNEIKTGEQLTTSHVFSGFGCEGGNTSPSLTWSGAPEGTKSFAVTVYDPDAPTGSGWWHWTVANIPATVTYFPADAGRRDGTKLPTGAVQGRNDFGYAGFGGACPPKGDKPHHYQFKIWALKTDKIPVDSNSSGALVGYMLNANKIATAEIIPVYEVK

SEQ ID NO: 1017 - protein, 183 aa, Escherichia coli
MKKLIVSSVLAFITFSAQAAAFQVTSNEIKTGEQLTTSHVFSGFGCEGGNKSPSLTWSGAPEGTKSFAVTVYDPDAPTGSGWWHWTVANIPATVTYLPADAGRRDGTKLPTGAVQGRNDFGYAGFGGACPPKGDKPHHYQFKIWALKTDKIPVDSNSSGALVGYMLNANKIATAEIIPVYEVK

SEQ ID NO: 1018 - protein, 183 aa, Escherichia coli
MKKLIVSSVLAFITFSAQAAAFQVTSNEIKTGEQLTTSHVFSGFGCEGGNTSPSLTWSGAPEGTKSFAVTVYDPDAPTGSGWWHWIVANIPATVTYLPADAGRRDGTKLPTGAVQGRNDFGYAGFGGACPPKGDKPHHYQFKIWALKTDKIPVDSNSSGALVGYMLNANKIATAEIIPVYEVK

SEQ ID NO: 1019 - protein, 183 aa, Escherichia coli
MKKLIVSSVLAFITFSAQAAAFQVTSNEIKTGEQLTTSHVFSGFGCEGGNTSPSLTWSGAPEGTKSFAVTVYDPDAPTGSGWWHWTVANIPATVTYLPADAGRRDGTKLPTGAFQGRNDFGYAGFGGACPPKGDKPHHYQFKIWALKTDKIPVDSNSSGALVGYMLNANKIATAEIIPVYEVK

SEQ ID NO: 1020 - protein, 183 aa, Escherichia coli
MKTLIVSTVLAFITFSAQAAAFQVTSNEIKTGEQLTTSHVFSGFGCEGGNTSPSLTWSGAPEGTKSFAVTVYDPDAPTGSGWWHWTVANIPATVTYLPVDAGRRDGTKLPTGAVQGRNDFGYAGFGGACPPKGDKPHHYQFKVWALKTEKIPVDSNSSGALVGYMLNANKIATAEITPVYEIK

SEQ ID NO: 1021 - protein, 183 aa, Escherichia coli
MKKLIVSSVLAFITFSAQAAAFQVTSNEIKTGEQLTTSHVFSGFGCEGSNTSPSLTWSGAPEGTKSFAVTVYDPDAPTGSGWWHWTVANIPATVTYLPADAGRRDGTKLPTGAVQGRNDFGYAGFGGACPPKGDKPHHYQFKIWALKTDKIPVDSNSSGALVGYMLNANKIATAEIIPVYEVK

SEQ ID NO: 1022 - protein, 183 aa, Escherichia coli
MKKLIVSGVLAFITFSAQAAAFQVTSNEIKTGEQLTTSHVFSGFGCEGGNTSPSLTWSGAPEGTKSFAVTVYDPDAPTGSGWWHWTVANIPATVTYLPADAGRRDGTKLPTGAVQGRNDFGYAGFGGACPPKGDKPHHYQFKIWALKTDKIPVDSNSSGALVGYMLNANKIATAEIIPVYEVK

SEQ ID NO: 1023 - protein, 183 aa, Escherichia coli
MKKLIVSSVLAFITFSAQAAAFQVTSNEIKTGEQLTTSHVFSGFGCEGGNTSPSLTWSGAPEGTKSFAVTVYDPDAPTGSGWWHWTVANIPATVTYLPADAGRRDGTKLPTGAVQGRNDFGYAGFGGACPPKGDKPHHYQFKIWDLKTDKIPVDSNSSGALVGYMLNANKIATAEIIPVYEVK

SEQ ID NO: 1024 - protein, 183 aa, Escherichia coli
MKKLIVSSVLAFITFSAQAAAFQVTSNEIKTGEQLTTSHVFSGFGCEGGNTSPSLTWSGPPEGTKSFAVTVYDPDAPTGSGWWHWTVANIPATVTYLPADAGRRDGTKLPTGAVQGRNDFGYAGFGGACPPKGDKPHHYQFKIWALKTDKIPVDSNSSGALVGYMLNANKIATAEIIPVYEVK

SEQ ID NO: 1025 - protein, 183 aa, Escherichia coli
MKKLIVSSVLAFITFSAQAAAFQVTSNEIKTGEQLTTSHVFSGFGCEGGNTSPSLTWSGAPEDTKSFAVTVYDPDAPTGSGWWHWTVANIPATVTYLPADAGRRDGTKLPTGAVQGRNDFGYAGFGGACPPKGDKPHHYQFKIWALKTDKIPVDSNSSGALVGYMLNANKIATAEIIPVYEVK

SEQ ID NO: 1026 - protein, 183 aa, Escherichia coli
MKKLIVSSVLAFITFSAQAAAFQVTSNEIKTGEQLTTSHVFSGFGCEGDNTSPSLTWSGAPEGTKSFAVTVYDPDAPTGSGWWHWTVANIPATVTYLPADAGRRDGTKLPTGAVQGRNDFGYAGFGGACPPKGDKPHHYQFKIWALKTDKIPVDSNSSGALVGYMLNANKIATAEIIPVYEVK

SEQ ID NO: 1027 - protein, 183 aa, Escherichia coli
MKKLIVSSVLAFITFPAQAAAFQVTSNEIKTGEQLTTSHVFSGFGCEGGNTSPSLTWSGAPEGTKSFAVTVYDPDAPTGSGWWHWTVANIPATVTYLPADAGRRDGTKLPTGAVQGRNDFGYAGFGGACPPKGDKPHHYQFKIWALKTDKIPVDSNSSGALVGYMLNANKIATAEIIPVYEVK

SEQ ID NO: 1028 - protein, 183 aa, Escherichia coli
MKKLIVSSVLAFITFSAQAAAFQVTSNEIKTGEQLTTSHVFSGFGCEGGNTSPSLTWSGAPEGTKSFAVTVYDPDAPTGSGWWHWTVANIPATVTYLPADAERRDGTKLPTGAVQGRNDFGYAGFGGACPPKGDKPHHYQFKIWALKTDKIPVDSNSSGALVGYMLNANKIATAEIIPVYEVK

SEQ ID NO: 1029 - protein, 183 aa, Escherichia coli
MKKLIVSSVLAFITFSAQAAAFQVTSNEIKTGEQLTTSHVFSGFGCEGGNTSPSLTWSGAPEGTKSFAVTVYDPDAPTGSGWWHWTVANIPATVTYLPADAGRRDRTKLPTGAVQGRNDFGYAGFGGACPPKGDKPHHYQFKIWALKTDKIPVDSNSSGALVGYMLNANKIATAEIIPVYEVK

SEQ ID NO: 1030 - protein, 183 aa, Escherichia coli
MKKLIVSSVLAFITFSAQAAAFQVTSNEIKTGEQLTTSHVFSGFGCEGGNTSPSLTWSGAPEGTKSFAVTVYDPDAPTGSGWWHWTVANIPATVTYLPADAGRRDGTKLSTGAVQGRNDFGYAGFGGACPPKGDKPHHYQFKIWALKTDKIPVDSNSSGALVGYMLNANKIATAEIIPVYEVK

SEQ ID NO: 1031 - protein, 183 aa, Escherichia coli
MKKLIVSSVLAFITFSAQAAAFQVTSNEIKTGEQLTTSHVFSGFGCEGGNTSPSLTWSGAPEGTKSFAVTVYDPDAPTGSGWWHWTVANIPATVTYLPADAGRRDGTKLPTGAVQGRNDFGYAGFGGACPPKGDKPHHYQFKIWALKTDKIPVDSNSSGALVGYMLNANKIATAEIIPDYEVK

SEQ ID NO: 1032 - protein, 183 aa, Escherichia coli
MKKLIVSSVLAFITFSAQAAAFQVTSNEIKTGEQLTTSHVFSGFGCEGGNTSPSLTWSGAPEGTKSFAVTVYDPDAPTGSGWWHWTVANITATVTYLPADAGRRDGTKLPTGAVQGRNDFGYAGFGGACPPKGDKPHHYQFKIWALKTDKIPVDSNSSGALVGYMLNANKIATAEIIPVYEVK

SEQ ID NO: 1033 - protein, 183 aa, Escherichia coli
MKKLIVSSVLAFITFSAQAAAFQVTSNEIKTGEQLTTSHVFSGFGCEGGNTSPSLTWSGAPEGTKSFAVTVNDPDAPTGSGWWHWTVANIPATVTYLPADAGRRDGTKLPTGAVQGRNDFGYAGFGGACPPKGDKPHHYQFKIWALKTDKIPVDSNSSGALVGYMLNANKIATAEIIPVYEVK

SEQ ID NO: 1034 - protein, 183 aa, Escherichia coli
MKKLIVSSVLAFITFSAQAAAFQVTSNEIKTGEQLTTSHVFSGFGCEGGNTSPSLTWSGAPEGTKSFAVTVYDPDAPTGSGWWHWTVANIPATVTYLPADAGRRDGTKLPTGAVQGRNDFGYAGFGGACPPKGDKPHHYQFKIWALKTDKIPVGSNSSGALVGYMLNANKIATAEIIPVYEVK

SEQ ID NO: 1035 - protein, 183 aa, Escherichia coli
MKKLIVSSVLAFITFSAQAAAFQVTSNEIKTGEQLTTSHVFSGFGCEGGNTSPSLTWSGAPEGTKSFAVTVYDPDAPTGSGLWHWTVANIPATVTYLPADAGRRDGTKLPTGAVQGRNDFGYAGFGGACPPKGDKPHHYQFKIWALKTDKIPVDSNSSGALVGYMLNANKIATAEIIPVYEVK

SEQ ID NO: 1036 - protein, 183 aa, Escherichia coli
MKKLIVSSVLAFITFSAQAAAFQVTSNEIKTGEQLTTSHVFSGFGCEGGNTSPSLTWSGAPEGTKSFAVTVYDPDAPTGSGWWHWTVANIPATVTYLPADAGRRDGTKLLTGAVQGRNDFGYAGFGGACPPKGDKPHHYQFKIWALKTDKIPVDSNSSGALVGYMLNANKIATAEIIPVYEVK

SEQ ID NO: 1037 - protein, 183 aa, Escherichia coli
MKKPIVSSVLAFITFSAQAAAFQVTSNEIKTGEQLTTSHVFSGFGCEGGNTSPSLTWSGAPEGTKSFAVTVYDPDAPTGSGWWHWTVANIPATVTYLPADAGRRDGTKLPTGAVQGRNDFGYAGFGGACPPKGDKPHHYQFKIWALKTDKIPVDSNSSGALVGYMLNANKIATAEIIPVYEVK

SEQ ID NO: 1038 - protein, 183 aa, Escherichia coli
MKKLIVSSVLAFITFSAQAAAFQVTSNEMKTGEQLTTSHVFSGFGCEGGNTSPSLTWSGAPEGTKSFAVTVYDPDAPTGSGWWHWTVANIPATVTYLPADAGRRDGTKLPTGAVQGRNDFGYAGFGGACPSKGDKPHHYQFKIWALKTDKIPVDSNSSGALVGYMLNANKIATAEIIPVYEVK

SEQ ID NO: 1039 - protein, 183 aa, Escherichia coli
MKKLIVSSVLAFITFSAQAAAFQVTSNEIKTGEQLTTSHVFSGFGCEGGNTSPSLTWSGAPEGTKSFAVTVYDPDAPTGSGWGHWTVANIPATVTYLPADAGRRDGTKLPTGAVQGRNDFGYAGFGGACPPKGDKPHHYQFKIWALKTDKIPVDSNSSGALVGYMLNANKIATAEIIPVYEVK

SEQ ID NO: 1040 - protein, 183 aa, Escherichia coli
MKKLIVSSVLAFITFSAQAAAFQVTSNEIKTGEQLTTSHVFSGFGFEGGNTSPSLTWSGAPEGTKSFAVTVYDPDAPTGSGWWHWTVANIPATVTYLPADAGRRDGTKLPTGAVQGRNDFGYAGFGGACPPKGDKPHHYQFKIWALKTDKIPVDSNSSGALVGYMLNANKIATAEIIPVYEVK

SEQ ID NO: 1041 - protein, 183 aa, Escherichia coli
MKKLIVSSVLAFITFSAQAAAFQVTSNEIKTGEQLTTSHVFSGFGGEGGNTSPSLTWSGAPEGTKSFAVTVYDPDAPTGSGWWHWTVANIPATVTYLPADAGRRDGTKLPTGAVQGRNDFGYAGFGGACPPKGDKPHHYQFKIWALKTDKIPVDSNSSGALVGYMLNANKIATAEIIPVYEVK

SEQ ID NO: 1042 - protein, 183 aa, Escherichia coli
MKKLIVSSVLAFITFSAQAAAFQVTSNEIKTGEQLTTSHVFSGFGCEGGNTSPSLTWSGVPEGTKSFAVTVYDPDALTGSGWWHWTVVNIPATITYLPVDAGRRDGTKLPTGAVQGRNDFGYAGFGGACPPKGDKPHHYQFKVWALKTEKIPVDSNSSGALVGYMLNANKIATAEITPVYEIK

SEQ ID NO: 1043 - protein, 183 aa, Escherichia sp. MOD1-EC5287
MKKLIVSSVLAFITFSAQAAAFQVTSNEIKTGEQLTTSHVFSGFGCEGGNTSPSLTWSGAPEGTKSFAVTVYDPDAPTGSGWWHWTVANIPATVTYLPTDAGRRDGTKLPTGAVQGRNDFGYAGFGGACPPKGDKPHHYQFKVWALKTDKIPVDSNSSGALVGYMLNANKIATAEITPVYEIE

SEQ ID NO: 1044 - protein, 184 aa, Gilliamella apicola
MRHSNKLKPLFYGVLLLFTSYSYASEMQLSSPDLNKNGFTDQFIYNQFGCEGKNLSPSIEWNNVPKEAKSLAFTMYDPDAPTGSGWWHWTVVNIPVDTTELKQSAGNNINLLPNGSQQVRNDFGTANYGGPCPPENSNHRYQFTLYALDIDNINVDDKTTPALVGFIINSHQIAKASITFNYGR

SEQ ID NO: 1045 - protein, 153 aa, Hydrogenobacter hydrogenophilus
MKVESPAFKDGDVIPKKYTCDGENVSPPLVWLGYPKEAKSFVLIVDDPDAPVGTFTHWVVYDIPISETSLKENFPKDGQVGSVKQGRNDFGKVGYGGPCPPKGHGYHRYFFRVYALNVESLGLPPGATRKQVESKMRGHILSEGYTVGRYKRE

SEQ ID NO: 1046 - protein, 194 aa, Macrococcus caseolyticus
MSKVATLIKETVAAAQKHGVFPEVLQAFQPSGALNVTYKSKQAQPGAELTVAETQELPEIEAFVPSINASSSYTLVFTDPDAPRRGDPTWSEYAHYLVSDIHLDPSKSGEFQRIDFSKAHELLSYLGPGPPPKTSLHRYVFLLFEGTTTKKPSDRPNWGLGKPGAGAIDFLKGEKVTPIALNFFVAQNTTEPLQ

SEQ ID NO: 1047 - protein, 152 aa, Methylocapsa aurea
MRLSSSAFSDGGPIPRRFTCDGEDLSPPLSWSDPPTGTRSFALLCDDPDAPGGTFHHWAVYDIAVDRTELAQGSDRHADAQGFKRAANDFNRLGYGGPCPPQRHGPHRYQFCLLALSVDHLPLRKGSSCREVEREARKHALAEAGLVGTYER

SEQ ID NO: 1048 - protein, 174 aa, Microbacterium hominis
MTNDPNWKLPDVPTFSLTSPAFQDHGALPTSARGAAAGGEDRSPALEWSGAPEGTQSYVLTVFDPDAPSGSGFWHWALTNIPADVTSLAAGAGTDDALLPTGSVRHRNEYGTNVFIGAAPPPGTGFHRYTYTLSALSVPTLEGAADVTPAIIGLRLRPHIIGRAQLVGLTETPA

SEQ ID NO: 1049 - protein, 196 aa, Microbulbifer aggregans
MNVFASAHRGQTLASGWAAKLVALITLTVIASMSSAQEFTLTSDTLKAGERMPMEHVYSGCGGENISPALSWSGAPEGTKSFALMVHDPDAPTGSGWWHWVVFNIPADQNSLPAGAGEPKNGLIPEATQVRNDYGTPGYGGACPPKGHGDHRYQFRLVALGVEELPLDETATPAKVGFNVNANKLGEAELEVLWGH

SEQ ID NO: 1050 - protein, 178 aa, Microterricola sp. OV434
MFNYDPYAELATLKSFAPLTVLSESVRDGEPFARAQWAAGRGGSDTSPQLSWSGAPAETLSYAVTCFDPDAPTGSGYWHWAVCNIPANVTSLPENAGAPGGALLPAGSLTLPNEIRLTSFIGAGPPPTTGVHRYIFAVHALDVARLDLDPGSTPAVLGFNLHFHTLARGTITGTATAD

SEQ ID NO: 1051 - protein, 181 aa, Mycobacterium branderi
MRPALAALAVLILMLPGCSGAKENPQNQVTTPKAAKLAVSSPAFADNTQIPNEYSCKGRNVPPPLRWQNVPTGAQSLALVVDDPDAPSGLYVHWVVTGIPASTTELGPLPQGASVSLNSAGKPEYLGPCPPAGSGVHHYRFQLYALNKPLALAPTTPAQEATKTIADAAIAEGRTVGLFSG

SEQ ID NO: 1052 - protein, 168 aa, Mycobacterium celatum
MLPGCSGAKENPQNQPTPSKAAKLGVSSPAFADNTQIPVEYSCKGRNVPPPLRWDNVPTGAQSLALVVDDPDAPSGLYIHWVVTGIPTATTELGPLPPGASVSLNSAGKPEYFGPCPPAGSGVHHYRFQLYALNKPLALAPTTPAPEATKAIADAASAQGTTVGLFSG

SEQ ID NO: 1053 - protein, 181 aa, Mycobacterium celatum
MRPALAALAVLILMLPGCSGAKENPQNQPTPSKAAKLGVSSPAFADNTQIPVEYSCKGRNVPPPLRWDNVPTGAQSLALVVDDPDAPSGLYIHWVVTGIPTATTELGPLPPGASVSLNSAGKPEYFGPCPPAGSGVHHYRFQLYALNKPLALAPTTPAPEATKAIADAASAQGTTVGLFSG

SEQ ID NO: 1054 - protein, 168 aa, Mycobacterium kyorinense
MLPGCSGAKENPQNQPTTSKAAKLAVSSPAFADNTQIPAEYTCKGRNVPPPLRWDHVPTGTQSLALVVDDPDAPSGLYVHWVVTGIPASTTELGPLPQGASVSLNSAGKPEYFGPCPPAGSGVHHYRFQLYALNKPLTLAPTTPAAEATKTIAEAAIAEGRTVGLFGG

SEQ ID NO: 1055 - protein, 181 aa, Mycobacterium kyorinense
MRPALAALAVLILMLPGCSGAKENPQNQPTTSKAAKLAVSSPAFADNTQIPAEYTCKGRNVPPPLRWDHVPTGTQSLALVVDDPDAPSGLYVHWVVTGIPASTTELGPLPQGASVSLNSAGKPEYFGPCPPAGSGVHHYRFQLYALNKPLTLAPTTPAAEATKTIAEAAIAEGRTVGLFGG

SEQ ID NO: 1056 - protein, 187 aa, Mycobacterium sp. 1164966.3
MSTLRRIAPAGSGLALAVALAGLGGGISAGTATAAPPAGPLTITSPAFADGASIPVQYSCKGANLAPPLTWSTPSGAALVLDDPDAPGGTYVHWVVTGIPPGPGSTPDGQTPGGGRVLPNSAGQTSYSGPCPPAGSGKHHYRFTLYQLPDNYQLPGHLAGAQAAQTIAGAATAQAQLTGTFELALHG

SEQ ID NO: 1057 - protein, 170 aa, Mycobacterium sp. 852002-51163_SCH5372311
MALAGFGGGVSAGTANAAPPTGPLAITSPAFADGASIPVQYSCKGANIAPPLTWSTPSGAALVVDDPDAPGGTYVHWVVTGIPPGSGSTPDGQTPGGGKVLPNSAGQTSYSGPCPPAGSGRHHYRFTLYQLPDNYQLPGHLAGAQAAQTIAGAATAQAQLTGTFELALHG

SEQ ID NO: 1058 - protein, 187 aa, Mycobacterium sp. 852002-51163_SCH5372311
MSTLRRTASAGAGLALAMALAGFGGGVSAGTANAAPPTGPLAITSPAFADGASIPVQYSCKGANIAPPLTWSTPSGAALVVDDPDAPGGTYVHWVVTGIPPGSGSTPDGQTPGGGKVLPNSAGQTSYSGPCPPAGSGRHHYRFTLYQLPDNYQLPGHLAGAQAAQTIAGAATAQAQLTGTFELALHG

SEQ ID NO: 1059 - protein, 168 aa, Mycobacterium sp. MFM001
MLPGCSGAKENPQNQLTTSKAAKLAVSSPAFADNAPIPAEYSCKGRNMPPPLRWDHVPAGAKSLALVVDDPDAPSGLYVHWVVTNIPASTTELGPLPQGASVSLNSAGKPEYFGPCPPAGSGVHHYRFQLYALNKPLTLAPTTPAPEATKTIADAAIAEGRTVGLFSG

SEQ ID NO: 1060 - protein, 181 aa, Mycobacterium sp. MFM001
MRPALAALAVLILMLPGCSGAKENPQNQLTTSKAAKLAVSSPAFADNAPIPAEYSCKGRNMPPPLRWDHVPAGAKSLALVVDDPDAPSGLYVHWVVTNIPASTTELGPLPQGASVSLNSAGKPEYFGPCPPAGSGVHHYRFQLYALNKPLTLAPTTPAPEATKTIADAAIAEGRTVGLFSG

SEQ ID NO: 1061 - protein, 157 aa, Nocardia amamiensis
MPATNEITVSSSAFTDGAPIPETYSCTGKNRPPPLTWTVPESAVRLALIMDDPDAPIGLFTHWVVSDIPLTTTSSEEGQTPKGGVVSLNSADLADYFGPCPPTGTGVHHYRFIVHALSHPVSLSSKTPVAQAKSAIEGASVGSGQLVGTYTVDTGPV

SEQ ID NO: 1062 - protein, 168 aa, Nocardia amikacinitolerans
MNANEALLAALRHERFVPDKIDAFAGAELSAKYGGVPVSPGGKLSVAQTANAPELEWPLADDESASYTVLMFDVDAPSRSASHGLCWLHWAVGDVPGLDIARGSEIVPYAGPTPPAGSGPHRYVLVVYRQAEEMGVRQLGRPKFDPLRFAHSQALEPVAANFFVAENE

SEQ ID NO: 1063 - protein, 195 aa, Nocardia amikacinitolerans
MESARVSRVPGGASCRDEGRDHVIIQDVNANEALLAALRHERFVPDKIDAFAGAELSAKYGGVPVSPGGKLSVAQTANAPELEWPLADDESASYTVLMFDVDAPSRSASHGLCWLHWAVGDVPGLDIARGSEIVPYAGPTPPAGSGPHRYVLVVYRQAEEMGVRQLGRPKFDPLRFAHSQALEPVAANFFVAENE

SEQ ID NO: 1064 - protein, 195 aa, Nocardia amikacinitolerans
MESVRVSRVPGGASCRDEGRDHVIIQDVNANEALLAALRHERFVPDQIDAFAGAELSAKYGGVPVSPGGKLSVAQTANAPELEWPLADDESASYTVLMFDVDAPSRSASHGLCWLHWAVGDVPGLDIARGSEIVPYAGPTPPAGSGPHRYVLVVYRQAEEMGVRQLGRPKFDPLRFAHSQVLEPVAANFFVAENE

SEQ ID NO: 1065 - protein, 238 aa, Nocardia exalbida
MAAAITYRHRARSARTGDGPRSPPVTACLRPCLVGRASSAYAGLTTTYRVRLVSAAVARRARPHGQGQANRRTRLLSSTRAEAAMPATTEISVRSSAFNHGDPIPAVYTCEGRNESPPLAWTAPPQAAGLALIVDDPDAPSGLFTHWVVSNIPPATTSAEEGQTPAGGVVSLNSADRAEYFGPCPPAGTGTHHYRFIVYALSHPVRVDSQTSPADARSAIVDASIGDGRLIGTYTVDG

SEQ ID NO: 1066 - protein, 154 aa, Nocardia gamkensis
MPATTEISVRSTAFNHGDPIPTVYTCEGRNESPPLAWTAPPQATGLALIVDDPDAPSGLFTHWVVSNIPPATTSAEEGQTPAGGVVSLNSADRAEYFGPCPPAGTGTHHYRFIVYALSHPVRVDSQTSAADARSAIVDASMGDGRLIGTYTVDG

SEQ ID NO: 1067 - protein, 180 aa, Nocardia jiangxiensis
MPDYSYNPYASLPQLPTFELTSADVSDGSAFAIEQASGAFGVPGGKDVSPQLSWSGFPAETKSFAVTVFDPDAPTASGFWHWAVADIPVTVTSLEGGAGSSGGTLPAGAVQLNNDGGFPGFVGAGPPPGHGYHRYFITVHAVDVESLGVGADATPAFLGFNLFSHAIGRAQIVATFEVKG

SEQ ID NO: 1068 - protein, 168 aa, Nocardia lijiangensis
MNANDAFLATLRHEKFVPDRIDAFAGVEASVKYGDVRVSPGLQLSVEQTASMPDLEWPLREKGSGVYAVLMFDPDAPSRSTSHGLCWLHWAVGNISGLDFAQGVEIVPYAGPTPPKGSGPHRYVLVVYQQSEELSVRQLDRPRFDPLRFAHSHSLEPVAANFFVTEND

SEQ ID NO: 1069 - protein, 180 aa, Nocardia vaccinii
MPDYSYNPYASLPQLPTFELTSADVTDGNAFAIEQASGAFGVPGGKDVSPQLSWSGFPAETKSFAVTVFDPDAPTASGFWHWVVADIPAAVTSLDSGAGSSGGTLPAGAVQLRNDGGFAGFVGAAPPAGHGYHRYFITVHAVDVESLGVGADATPAFLGFNLFSHAIARAQIVGTFEIQG

SEQ ID NO: 1070 - protein, 240 aa, Nocardia xishanensis
MSINVPRAITDSFTISAASLSASPSSEFGGRRSQCGSPAGIGRYRSSSVQVQRVTGGASCRFERRDGVIIQDVNANDALLTALQRERFVPDRIDAFAGAEATAKYGDVWISPGEKLSVEQTANAPELEWPLRENGSDAHTVLMFDVDAPSRATSHGLCWLHWAVGDIPGLDIARGAEIVPYAGPTPPKGSGPHRYVLAVYRQTRESSLPQLDRPRFDPLRFAHSLALEPVAANFFVAENE

SEQ ID NO: 1071 - protein, 145 aa, Nocardiopsaceae bacterium YIM 96095
MRITSPDIGADGRLADRHALEHDNQPPTLRISGVPEGTAELAIVCHDPDAPVPWGFTHWTLYGVPADTTEIGPGADSRYRAGTNGFGKEGYGGPRPPEGHGPHRYYFWVYALDRPVDGTPSLRRFLDTYGDAIVEQNRVVGIYER

SEQ ID NO: 1072 - protein, 176 aa, Nocardiopsis prasina
MAKPPSPYDFLPDVDAFTVTSDDVRDGQGLPRAQVSGIMGAGGEDASPHLSWSGFPEGTRSFAVTCFDPDAPTASGFWHWSVCDIPVDVTELAADAGNGSGLPEQAITLRNDAGSHRYIGAAPPAGHGPHRYMFVVHAVDVPSLGIEASASPAFLGFNLFSHAIGRAVVTPTYEQG

SEQ ID NO: 1073 - protein, 176 aa, Nocardiopsis sp. CNR-923
MAMPPSPYDFLPELPAFTVTSDDVADGKALPEPQVSGILGAGGEDASPHLSWSGFPEGTRSFAVTCFDPDAPTASGFWHWSVCNIPVEVTELATGAGDGSGLPESAVTVRNDAGGHRYVGAAPPPGHGPHRYIFAVHAVDVPRLDVDASASPAFVGFNLFSHAIARALITPVYERA

SEQ ID NO: 1074 - protein, 176 aa, Nocardiopsis sp. SBT366
MAKPPSPYDFLPDVDAFTVTSDDVKDGQVLSLAQVSGIMGAGGEDVSPHLSWSGFPEGTRSFAVTCFDPDAPTASGFWHWSVCDIPVEVTELAADAGNGSGLPEQAITLRNDAGSHRYIGAAPPAGHGPHRYMFVVHAVDVPSLGIDASASPAFLGFNLFSHAIGRAVLTPTYEQD

SEQ ID NO: 1075 - protein, 207 aa, Novosphingobium guangzhouense
MLEHVPAWLGQLLKHVRAGHAKLAIVREDMGERLFPLASPAFADGQRLPIRFTADGEGISPPLSWGPLPERTASLALLVEDPDAPAPHPLVHALVWNIPPDVGGLPEGAIVPDGDGAADGSDVGRNSYLAEGWLPPDPPKGHGVHDYVFQLFALSQVPALEANPGRSAFLEAIHGKVLAAGFLIGTYSRDEPANSGVAGAGLRPAGA

SEQ ID NO: 1076 - protein, 207 aa, Novosphingobium lindaniclasticum
MLEHVPAWLGKLLKDVRAGHSKLAIVREDMGDRLFPLSSPAFADGQRLPIRFTADGEGISPPLSWGPLPEGTASLALLVEDPDAPAPHPLVHALVWNIPPDVGGLPEGAIVPDGDGAADGSDVGRNSYLAEGWLPPDPPKGHGAHDYVFQLFALSEVPVIEANPGRSAFLEAIHGKVLAAGFLIGTYSRDEPAGSSTAGAGLRPAGV

SEQ ID NO: 1077 - protein, 133 aa, Novosphingobium lindaniclasticum LE124
MALLVEDPDAPAPHPLVHALVWNIPPDVGGLPEGAIVPDGDGAADGSDVGRNSYLAEGWLPPDPPKGHGAHDYVFQLFALSEVPVIEANPGRSAFLEAIHGKVLAAGFLIGTYSRDEPAGSSTAGAGLRPAGV

SEQ ID NO: 1078 - protein, 207 aa, Novosphingobium resinovorum
MLEHVPAWLGKLLKDVRAGHSQLAIVREDMGERLFPLSSPAFADGQRLPIRFTADGEGISPPLSWGPLPAGTMSLALLVEDPDAPAPHPLVHALVWNIPPDVSGLTEGAILPDGDGAADGSDVGRNSYLAEGWLPPDPPKGHGAHDYVFQLFALSKIPPLEANPGRSAFLEAIHGKILAAGFLIGTYSRDEPAASSTAGAGLRPAGA

SEQ ID NO: 1079 - protein, 160 aa, Parcubacteria group bacterium GW2011_GWA2_49_16
MDSQSQTTSSSLKLVSQAFSDGAPIPMQYTCKGQNINPPLNIIGVPPQAKSLALIMHDPDAVSGDFVHWLMWDIPTSTETVAANSVPPGAIQGTNSANKSQYIGPCPPAGTGTHRYMFELYALDRPLTNLNMETNREQLQRAMEGHIVAQHSLTGLFSAD

SEQ ID NO: 1080 - protein, 154 aa, Pleurocapsa sp. CCALA 161
MKLKLQDLEISSPAFSPGGKIPQRYTSEGENISPALNWNKIPPETKKLALICHDPDAPLPWGFTHWVVYNIPADITEIEEAGGDLFTAGFNSSGSKGYTGPAPPPGHGVHHYYFWLYALDRSLELQAGLSREELLEAIADYITAQARLIGTYQR

SEQ ID NO: 1081 - protein, 172 aa, Prochlorococcus marinus
MLKFLSVIFLSLLPIDTFAIEINSPAFKNGEKIPKKYGCKYNGGKNISIPINFSKVSKDAQSIALIIDDPDAKKVAGKTWVHWILSDIPPDTKYLDEVKDGKVGIGIAGKNSDRSKKYVGPCPPKNEHQYNIKAYSLNTKLEKSLKALTQKKFEKLYENEIISSFMISGKFK

SEQ ID NO: 1082 - protein, 183 aa, Proteobacteria
MKKLIVSSVLAFITFSAQAAAFQVTSNEIKTGEQLTTSHVFSGFGCEGGNTSPSLTWSGAPEGTKSFAVTVYDPDAPTGSGWWHWTVANIPATVTYLPADAGRRDGTKLPTGAVQGRNDFGYAGFGGACPPKGDKPHHYQFKVWALKTDKIPVDSNSSGALVGYMLNANKIATAEITPVYEIK

SEQ ID NO: 1083 - protein, 149 aa, Saccharomonospora sp. LRS4.154
MVELELSSPAFDDGAPIPAHHARQGGNEVPPLRWSPAPEGTEELVLLCEDPDAPGGTFTHWVVTSIPPEVTRVDDAVPSGAVLGRNSFGDLGWGGPHPPVGDEAHRYVFRVSAVDRPLGLGEGATAEDVHAAADGHVLAEGTLVGSFAR

SEQ ID NO: 1084 - protein, 181 aa, Saccharomonospora viridis
MADQARDRATGPEGARDTGRGDVSSAGPSHSPASDLELRSPAFSEGASIPQRYSRQGGNEVPPLEWTRVPEGTEELALLCEDPDAPGGVFTHWVVTSIPPETARIDDALSAGAELGQNDFGELGWSGPQPPVGDGEHRYFFRLYAVDRPLGLGEGASAEDVHAAVDEHILATDTLVGLFAR

SEQ ID NO: 1085 - protein, 181 aa, Saccharomonospora viridis
MADQARDRATGPEGARDTGRGDVSSAGPSHSPASGLELRSPAFSEGASIPQRYSRQGGNEVPPLEWTRVPEGTEELALLCEDPDAPGGVFTHWVVTSIPPETARIDDALSAGAELGQNDFGELGWSGPQPPVGDGEHRYFFRLYAVDRPLGLGEGASAEDVHAAVDEHILATDTLVGLFAR

SEQ ID NO: 1086 - protein, 177 aa, Salinispora pacifica
MTLERPIAPDPYELLPTVPSFTLTSDDVRNGEPMDATHAHPSVGGDDLSPHLAWSGFPAETKGFVVTCFDPDAPTGSGFWHWVLVNLPTSVTELPRGASSDGLSGGFTVRNDYSQQGYGGAAPPRGDRPHRYLFAVHALGMERLDVTPDASPAYVGFNLAFHTLARAVIRPTYQVTQ

SEQ ID NO: 1087 - protein, 183 aa, Shigella
MKKLIVSSVLAFITFSAQAAAFQVTSNEIKTGEQLTTSHVFSGVGCEGGNTSPSLTWSGAPEGTKSFAVTVYDPDAPTGSGWWHWTVANIPATVTYLPADAGRRDGTKLPTGAVQGRNDFGYAGFGGACPPKGDKPHHYQFKIWALKTDKIPVDSNSSGALVGYMLNANKIATAEIIPVYEVK

SEQ ID NO: 1088 - protein, 183 aa, Shigella flexneri
MKKLIVSSVLAFITFSAQAAAFQVTSNEIKTGEQLTTSHVFSGFGCEGGNTSPSLTWSGAPEGTKSFAVTVYDPDAPTGSGWWHWTVANIPATVTYLPTDAGKRDGTKLPTGAVQGRNDFGYAGFGGACPPKGDKPHHYQFKVWALKTDKIPVDSNSSGALVGYMLNANKIATAEITPVYEIK

SEQ ID NO: 1089 - protein, 183 aa, Shigella flexneri
MKKLIVSSVLAFITFSAQAAAFQVTSNEIKTGEQLTTSHVFSGFGCEGGNTSPSLTWSGAPEGTKSFAVTVYDPDAPTGSGWWHWTVANIPATVTYLPTDAGRRDGTKLPTGAVQGRNDFGYAGFGGACPPKGDKPHHYQFKVWALKTDKTPVDSNSSGALVGYMLNANKIATAEITPVYEIK

SEQ ID NO: 1090 - protein, 183 aa, Shigella flexneri
MKKLIVSSVLAFITFSAQAAAFQVTSNEIKTGEQLTTSHVFSGFGCEGGNTSPSLTWSGAPEGTKSFAVTVYDPDAPTGSGWWHWTVANIPATVTYLPTDAGRRDGTKLPTGAVQGRNDFGYAGFGGACPPKGDKPHHYQFKVWALKTDKISVDSNSSGALVGYMLNANKIATAEITPVYEIK

SEQ ID NO: 1091 - protein, 183 aa, Shigella flexneri
MKKLIVSSVLAFITFSAQAAAFQVTSNEIKTGEQLTTSHVFSGFGCEGGNTSPSLTWSGAPEGTKSFAVTVYDPDAPTGSGWWHWTVANIPATVTYLPTDAGRRDGTKLTTGAVQGRNDFGYAGFGGACPPKGDKPHHYQFKVWALKTDKIPVDSNSSGALVGYMLNANKIATAEITPVYEIK

SEQ ID NO: 1092 - protein, 183 aa, Shigella flexneri
MKKLIVSSVLAFITFSAQAAAFQVTSNEIKTGEQLTTSHVFSGFGCEGGNTSPSLTWSGAPEGTKSFAVTVYDPDAPTGSGWWHWTVANIPATVTYLPADAGRRDGTKLPTGAVQGRNDFGYAGFGGACPPKGDKPHHYQFKIWALKTDKIPVDSNSSGALVGYMLNANKIATAEIIPVYEVN

SEQ ID NO: 1093 - protein, 205 aa, Sphingomonas
MLEHVPAWLGALLRGVRAGASKLTIVDPALGSFDSLDLSSLAFADGQRLPERFTADGEGLSPPLHWRGVPAGTRRLALIVEDPDAPAPQPLVHAILWDLPPEDEQLPEGDIRPDGDGEAGHGDVGRNSYLREGWLPPDPPTGHGEHRYAFQLFALGDGPDLDPNPGRSALVEAMAGRVLAAGLLTGTYSRGEPADVGPVGAPAPV

SEQ ID NO: 1094 - protein, 207 aa, Sphingomonas phyllosphaerae
MLEHVPHWLGSLMHNVRAGHAKLAIVQDGIVTGDARLELSSLAFADGARLPERFTADGEGVSPPLTWRGVPAGTAALALLVEDPDAPAPNPLVHAVVWNLPPEDGSLPEGAIAPDGRGADDGSDVGRNSYAQEGWLPPDPPTGHGSHDYVFQLFALDSAAAVDINPGRSELLEAIRGHVIAAGMLVGTYSRGEEAPVGPASASTQVA

SEQ ID NO: 1095 - protein, 210 aa, Sphingomonas sanxanigenens
MLEHVPGWLGGLLRNIRAGHAKLVIVDPDLQLGSTVIDLSSPAFANQARLPVRFTADGEGVSPPLVWGPLPEGTMSLALIVEDPDAPAPSPIVHGIVWGLPADEHRLAEGAIAPDGDGEQDGRDVGRNSYFGEGWLPPDPPTGHGNHDYVFQLFALATAPDIGSNPGRSGLVKAMRGNILAAGMLVGTYSRGEDAELRRSEPAGARIAPA

SEQ ID NO: 1096 - protein, 210 aa, Sphingomonas sp. CCH5-D11
MLEHIPAWLGRSLGNVRAGASKLAIVQPELGGRFEPIDLSSPAFAQDARLPPRFTADGEGISPPLVWGALPEGTATLALLVEDADAPAPQPLVHAVIWGIPADAGRLPEGAIVADGAGLADTGDVGRNSYLGEGWLPPDPPTGHGEHRYVFQLFALDAAAEDPGPSPGRSALVRAMAGHVLAAGLLIGTYSRGEEALTGHAQTTVAATST

SEQ ID NO: 1097 - protein, 205 aa, Sphingomonas sp. Leaf25
MLEHVPAWLGALLRGVRAGASKLTIVDPALGSFDSLDLSSLAFADGQRLPERFTADGEGLSPPLHWRGVPAGTRRLALIVEDPDAPAPQPLVHAILWDLPPEDGQLPEGDIRPDGDGAAGHGDVGRNSYLREGWLPPDPPTGHGEHRYAFQLFALGDGPGLDPNPGRSALVEAMAGRVLAAGLLTGTYSRGEPADVGPVGAPATA

SEQ ID NO: 1098 - protein, 207 aa, Sphingomonas sp. LH128
MLEHVPAWLGSLLKDVRAGHSKLAIVREDMGDRLFPLSSPAFADGQRLPIRFTADGEGVSPPLIWGPLPAGTASLALLVEDPDAPAPNPLVHGLVWNIPPDVGGLPEGAIMPDGNGAADGSDVGRNSYLAEGWLPPDPPKGHGAHDYVFQLFALSHVPVLEANPGRSAFLDAIQGKVLAAGLLIGTYSRDEPASFGTAGAGLRPAGA

SEQ ID NO: 1099 - protein, 210 aa, Sphingomonas sp. OV641
MLEHIPAWLGRSLGNVRAGASKLAIVQPELGGRFEPIDLSSPAFAQDARLPPRFTADGEGISPPLVWGALPDGTATLALLVEDADAPAPQPLVHAVIWGIPADAGRLPEGAIVADGAGLADTGDVGRNSYLGEGWLPPDPPTGHGEHRYVFQLFALDAAAEDPGPSPGRSALVRAMAGHVLAAGLLIGTYSRGEEALTGHAQTTVAATST

SEQ ID NO: 1100 - protein, 178 aa, Streptomyces
MSDPRPPLPHDFLPEVASFTVVSDEVKPGAALDDAQVQAAGNRSPQLRWEGFPAGTKSFAVTCFDPDAPTGSGFWHWVLFDIPASVTELPAGAGSPGSAGLPEGAVHARNDYGTREFVGAAPPPGDGSHRYVFTVYAVDTEHLDADADSSPAVVGFNLRFHTLGRAQLVGEYEVPAEG

SEQ ID NO: 1101 - protein, 178 aa, Streptomyces
MSDPRPPLPHDFLPEVASFTVVSDEVKPGATLDDAQVQAAGNRSPQLRWEGFPAGTKSFAVTCFDPDAPTGSGFWHWVLFDIPASVTELPAGAGSPDFAGLPEGAVHARNDYGTREFVGAAPPPGDGSHRYVFTVYAVDTEHLDADADSSPAVVGFNLRFHTLGRAQLVGEYEVPAEG

SEQ ID NO: 1102 - protein, 178 aa, Streptomyces
MSDPRPPLPHDFLPEVASFTVVSDEVKPGATLDDAQVQAAGNRSPQLRWEGFPAGTKSFAVTCFDPDAPTGSGFWHWVLFDIPASVTELPAGAGSPGSAGLPEGAVHARNDYGTREFVGAAPPPGDGSHRYVFTVYAVDTEHLDADADSSPAVVGFNLRFHTLGRAQLVGEYEVPAEG

SEQ ID NO: 1103 - protein, 178 aa, Streptomyces
MSDPRPPLPHDFLPEVASFTVVSDEVKPGATLDDAQVQAAGNRSPQLRWEGFPAGTKSFAVTCFDPDAPTGSGFWHWVLFDIPASVTELPAGAGSPGSAGLPEGAVHARNDYGTREFVGAAPPPGDGSHRYVFTVYAVDTEHLDADADSSPAVVGFNLRFHALGRAQLVGEYEVPAEG

SEQ ID NO: 1104 - protein, 178 aa, Streptomyces albidoflavus
MSDPRPPLPHDFLPEVASFTVVSDEVKPGATLDDAQVQAAGNRSPQLRWEGFPAGTKSFAVTCFDPDAPTGSGFWHWVLFDIPASVTELPAGAGSPGSAGLPEGAVHARNDYGTREFVGAAPPPGDGSHRYVFTVYAVDTEHLDADADSSPAVVGFNLRFHTLGRAQLVGEYEVAAEG

SEQ ID NO: 1105 - protein, 150 aa, Streptomyces avicenniae
MTAMELRSTAFEDREPVPARYARDGENVSPPLDWSRPPPGTRSMALLCEDPDAPSGTFLHWLVTDIDPTSPGVGAGELPDGGKAHPNGFGDRRWDGPEPPQGEPAHRYLFRLYALPEGVSLPEKVTVADARRVLDTEGLATGTLTGLYQR

SEQ ID NO: 1106 - protein, 179 aa, Streptomyces seoulensis
MTEHKRRPLPHEFHPPVPSFTVTSEDITEGGTLKDAQVQSEGNTSPELSWSGFPAETKSFAVTCFDPDAPTGSGFWHWVVFDIPASVTELAAGAGSGDFAELPKGAIQARNDYGAPGYVGAAPPPGDGSHRYVFTVYAVDEEKLGIGADATPAVVGFNLRFHALARAQLIGEYEIPAQG

SEQ ID NO: 1107 - protein, 148 aa, Synergistales bacterium 53_16
MTFNIRSNAFEEGGRIPRKYTCDESDLSPALEWEGEPEGTQSFVLIMDDPDAPVGTFTHWTLWNIPSATHSIPEGSSTGISGRNGFGRIGYGGPCPPKGHGPHRYFFRIFALDVPSIDLREGATRKELTQAIESHVLATAECMGIYER

SEQ ID NO: 1108 - protein, 188 aa, Tenacibaculum ovolyticum
MIKLIKVLTVLIVFSTSVFGQQTFTLTSNDLGGQATINEEFNGFGCTGKNQSPQLSWKNAPEGTKSFAVTMYDPDAPTGSGWWHWVVFDIPVNINELVSAAGNTKLNLTPKGVIQSITDYGANGYGGPCPPEGHGLHQYIITVYALKTEKLGLNESTNPAIVGYYLWNNTLAKASIVTYYQRNKLKTK

SEQ ID NO: 1109 - protein, 156 aa, Thermasporomyces composti
MTVLQLRSPSFRDHTPIPKRHAHDSLNLSPALEWSGVPEGTAELVLLCEDPDAPGRTFLHWLVTGIDPSTTGVGEGEVPPGGQEWTNGFGEVGYGGPQPPVGDSAHRYFFRLYALPRRENAPRPSDAQGLPSADDVHHAFDDLALATGVLVGLYQR

SEQ ID NO: 1110 - protein, 177 aa, Urmitella timonensis
MDLNSRPIAPDPYEALPELPTFTLTSADMTAGGQMPTAQIAAGENLSPQLSWSGFPKETKSFLLTCFDPDAPTPSGFWHWLITDIPAEMTSLPTGAGSSDLELDGPAFHLRNDGGGWSYMGAAPPKGDRPHRYIFAVHALDTETLELDEDASAAAANFQALFHCLARATLEVTYQNK

SEQ ID NO: 1111 - protein, 177 aa, Varibaculum cambriense
MDLNSRPLALDPYEALPQLPTFTLTSADMTAGGQMPTAQIAAGENLSPQLSWSGFPKETKSFLLTCFDPDAPTPSGFWHWLITDIPAEMTSLPTGAGSSDLELEGAAFHLRNDGGGWSYMGAAPPKGDRPHRYIFAVHALDTETLELDEDASAAAANFQALFHSLARATLEVTYQNK

SEQ ID NO: 1112 - protein, 177 aa, Varibaculum cambriense
MDLNSRPLALDPYQALPQLPTFTLTSADMTAGGQMPTAQIAAGENLSPQLSWSGFPKETKSFLLTCFDPDAPTPSGFWHWLITDIPAEMTSLPTGAGSSDLELDGPAFHLRNDGGGWSYMGAAPPKGDRPHRYIFAVHALDTETLELDEDASAAAANFQALFHSLARATLEVTYQNK

SEQ ID NO: 1113 - protein, 177 aa, Varibaculum cambriense
MDLNSRPLALDPYQALPQLPTFTLTSADMTVGGQMPTAQIAAGENLSPQLSWSGFPTETKSFLLTCFDPDAPTPSGFWHWLITDIPPEMTSLPTGAGSSDLELDGPAFHLRNDGGGWSYMGAAPPKGDRPHRYIFAVHALDTETLELDEDVSAAAANFQALFHSLARATLEVTYQNE

SEQ ID NO: 1114 - protein, 177 aa, Varibaculum cambriense
MDLNSRPLALDPYQALPQLPTFTLTSADMTAGGQMPTAQIAAGENLSPQLSWSGFPTETKSFLLTCFDPDAPTPSGFWHWLITDIPPEMTSLPTGAGSSDLELDGPAFHLRNDGGGWSYMGAAPPKGDRPHRYIFAVHALDTETLELDEDVSAAAANFQALFHSLARATLEVTYQNE

SEQ ID NO: 1115 - protein, 177 aa, Varibaculum cambriense DORA_20
MDLNSRPLALDPYQALPQLPTFTLTSTDMTAGGQMPTAQIAAGENLSPQLSWSGFPKETQSFLLTCFDPDAPTPSGFWHWLITDIPAEMTSLATGAGSSDLELDGPAFHLRNDGGGWSYMGAAPPKGDRPHRYIFAVHALDTETLELDEDASAAAANFQALFHSLARATLEVTYQNK

SEQ ID NO: 1116 - protein, 177 aa, Varibaculum sp. Marseille-P2802
MDLNSRPLALDPYEALPELPTFTLTSADMTAGGQMPPEQIAAGENLSPQLSWSGFPEETKSFLLTCFDPDAPTPSGFWHWLITDIPAEMTSLPTGAGSSDLELDGPAFHLRNDGGGWSYMGAAPPKGDRPHRYIFAVHALDTETLELDEDASAAAANFQALFHSLARATLEVTYQNK

SEQ ID NO: 1117 - protein, 177 aa, Varibaculum sp. Marseille-P5644
MDLNSRPLALDPYEALPELPTFTLTSTDMTAGEQMPTAQTAAGENLSPQLSWSGFPKETQSFLLTCFDPDAPTPSGFWHWLITDIPAEMTSLPTGAGRSDLELDGAAFHLRNDGGEWSYMGAAPPKGDRPHRYIFAVHALDTETLELDEDASAAAANFQALFHSLARATLEVTYQNK

SEQ ID NO: 1118 - protein, 179 aa, Vibrio
MKYSSIALLLLSSVAASTSYAGDFSLTSHDIMEGQRMAKTFEFTGFGCSGDNLSPQLSWQNAPKGTKSFAITAYDPDAPTGSGWWHWSTIDIPANVSELPRGVDLKKVGATEIRNDYGAKGFGGVCPPEGDGMHRYQFTVWALPEAKLDLDSNSSPALVGFMLNAMALDKATLTATYVR

SEQ ID NO: 1119 - protein, 179 aa, Vibrio vulnificus
MKYSSIALLLLSSVAASTSYAGDFSLTSHDIMEGQRMAKTFEFTGFGCSGDNLSPQLSWQNAPKGTKSFAITAYDPDAPTGSGWWHWSTIDIPANVSELPRGVDLKKVGATEIRNDYGAKGFGGVCPPEGDGMHRYQFTVWALPEAKLNLDSNSSPALVGFMLNAMALDKATLTATYVR

SEQ ID NO: 1120 - protein, 179 aa, Vibrio vulnificus
MKYSSIALLLLSSVAASTSYAGDFSLTSHDIMEGQRMAKTFEFTGFGCSGDNLSPQLSWQNAPKGTKSFAITAYDPDAPTGSGWWHWSTIDIPANVSELPRGVDLKKVGATEIRNDYGAKGFGGVCPPEGDGMHRYQFTVWALPEAKLDLDSNSSPALVGFILNAMALDKATLTATYVR

SEQ ID NO: 1121 - protein, 179 aa, Vibrio vulnificus
MKYSSIALLLLSSVAASTSYAGDFSLTSHDIMEGQRMAKTFEFTGFGCSGDNLSPQLSWQNAPKGTKSFAITAYDPDAPTGSGWWHWSAIDIPANVSELPRGVDLKKVGATEIRNDYGAKGFGGVCPPEGDGMHRYQFTVWALPEAKLDLDSNSSPALVGFMLNAMALDKTTLTATYVR

SEQ ID NO: 1122 - protein, 179 aa, Vibrio vulnificus
MKYSSIALLLLSSVAASTSYAGDFSLTSHDIMEGQRMAKTFEFTGFGCSGDNLSPQLSWQNAPKGTKSFAITAYDPDAPTGSGWWHWSAIDIPANVSELPRGVDLKKVGATEIRNDYGAKGFGGVCPPEGDGMHRYQFTVWALPEAKLDLDSNSSPALVGFMLNAMALDKATLTATYVR

SEQ ID NO: 1123 - protein, 179 aa, Vibrio vulnificus
MKYSSIALLLLSSVAASTSYAGDFSLTSHDIMEGQHMAKTFEFTGFGCSGDNLSPQLSWQNAPKGTKSFAITAYDPDAPTGSGWWHWSTIDIPANVSELPRGVDLKKVGATEIRNDYGAKGFGGVCPPEGDGMHRYQFTVWALPEAKLDLDSNSSPALVGFMLNAMALDKATLTATYVR

SEQ ID NO: 1124 - protein, 179 aa, Vibrio vulnificus
MKYSSIALLLLSSVAASTSYAGDFSLTSHDIMEGQRMAKTFEFTGFGCSGDNLSPQLSWQNAPKGTKSFAITAYDPDAPTGSGWWHWSAIDIPANVSELPRGVDLKKVGATEIRNDYGSKGFGGVCPPEGDGMHRYQFTVWALPEAKLDLDGNSSPALVGFMLNAMALDKATLTATYVR

SEQ ID NO: 1125 - protein, 179 aa, Vibrio vulnificus
MKYSSIALLLLSSVAASTSYAGDFSLTSHDIMEGQHMAKTFEFTGFGCSGDNLSPQLSWQNAPKGTKSFAITAYDPDAPTGSGWWHWSAIDIPANVSELPRGVDLKKVGATEIRNDYGAKGFGGVCPPEGDGMHRYQFTVWALPEAKLDLDSNSSPALVGFMLNAMALDKATLTATYVR

SEQ ID NO: 1126 - protein, 179 aa, Vibrio vulnificus
MKYSSIALLLLSSVASSTSYAGDFSLTSHDIMEGQRMAKTFEFTGFGCSGDNLSPQLSWQNAPKGTKSFAITAYDPDAPTGSGWWHWSAIDIPANVSELPRGVDLKKVGATEIRNDYGAKGFGGVCPPEGDGMHRYQFTVWALPEAKLDLDSNSSPALVGFMLNAMALDKATLTATYVR

SEQ ID NO: 1127 - protein, 179 aa, Vibrio vulnificus
MKYSSIALLLLSSVAASTSYAGDFSLTSHDIMEGQRMAKTFEFTGFGCSGDNLSPQLSWQKAPKGTKSFAITAYDPDAPTGSGWWHWSTIDIPANVSELPRGVDLKKVGATEIRNDYGAKGFGGVCPPEGDGMHRYQFTVWALPEAKLDLDSNSSPALVGFMLNAMALDKATLTATYVR

SEQ ID NO: 1128 - protein, 232 aa, Absidia glauca
MPLITPDMNIQHMLKEGGIMPEVIDEGFCPETLLMVNYGSSDVQMGNHLTTAQTAEAPQVQFLPADEEASYTLFLVDPDAPSKSDPKNAPWRHWVVVNIPGGQQVQVNAASNQLTNYMGPAPPPGSGDHRYIFLLYKQTNKEHPFEALAQGVQDRRTFDFKQYAATNQLELVASDRHRRRRYRYRRRHRRSRSIVERKMKDCKKAIVGHDKQDAQDGDKESATLRLSFKAIA

SEQ ID NO: 1129 - protein, 212 aa, Absidia glauca
MVSPLYLSSNIFILFCSSLLFCFLCIPNALADDTPKTRLKALQKAGIFPKLTGEVFRADKALGVEYQGGLQVTMGNFLTPAQTAKSPHIRFQGDPDSTYTLMLIDPDAPTIADPKWGPWRHWIVVNIPGERQSSNSAQSTQLTSYVGPAPPPKTGDHRYIFLLYKQPSFNKNYPPLSETFDDRRNFNFTDYAIKTGLKLHAVNFFYSKNAQS

SEQ ID NO: 1130 - protein, 197 aa, Absidia glauca
MPLISSNDMNVIQLLKTDEIIPDVFLEESFSSSVMPSPLMEIDYPQGHQVVFGNSLTPVDTKQSPVVKFVPSSGDDDAARTHYTLIMADPDAPSRQDRKFGYWRHWVVTNVPSDANGTITISTNQGEQHTPYIGPGPGPATGVHRYLFLLYKQQNPSTQFPSMKHEEKPDRRNFDFHQFAKDHQLDLVAFNYFLCSN

SEQ ID NO: 1131 - protein, 182 aa, Absidia repens
MPLTTYDMNIQHALKEAGIIPDVIDEGFQSDIILSVKYGNEDVAIGNHFTTGQTAEAPQVQFIPAEEDAEYSLFLVDPDAPTRSDPKYGPWRHWVAVNIPGSQQGQVNAASSQLTNYIGPAPPPGSGDHRYIFLLYKQTNKSHPFQSLSQSVQDRRSFDFKQYAANNKLELVAANFFYCKAP

SEQ ID NO: 1132 - protein, 198 aa, Agaricus bisporus var. bisporus H97
MSVTSDIINQLTSNGIIPDVLPPDSFTPSVFFTIVYPNTDVQTNLGNEVQRSNVLDEPEISIAPLNVPEVGDGEVRYTLVMTDPDAPKRFEPKFREWRHWVITGLQVTNTQPGKADVVYAAKTKPATTPYWPPGPPPESGLHRYTFLLFEEPKGGVTIPQGAVEYGTALEQRRSWNAMKFAGQYNLKLVGANFFLCQG

SEQ ID NO: 1133 - protein, 255 aa, Arthrobotrys oligospora ATCC 24927
MLYFPVPIWPGSRNGYVYELLWAFDLQMNCRRPICRIRVDYKYPHENGNPNRLVDVKNTSTYPTASYNALGFRISKNPKDDVVIDEFTPSVFVQAEFPSGKEIQLGNTLKVAATQEQPKVIVTPDNVSSESEDTRYTLCLTDPDAASRDNPKWAEFCHWLVTGIQRPSSGPLDFKNSKELLEYMGPAPPEKTGKHRYVLLLFKNGKKEPQKLDGRKKWGFEDHEPRVGARHYAKKYDLELVGANFFLCQNEKQDD

SEQ ID NO: 1134 - protein, 229 aa, Ascoidea rubescens DSM 1968
MFRPLVTISDSIIESLNKHEVFPDVLPEFKPKGLLTISYGKDKDVALGNTFSPDETQSVPRIAFTLNQPDSSTTSASSNKNSEGNLDSSYINITSSDLFTLVVTDPDAPSRTDKKWSEYCHYIASNLVLKDTTPGSASTDQFLSAELPLESSSNVTLIPYMGPGPPPKTGKHRYVFILFKQNHSLEPKAPSDRPNWGTGKPATGVYDWATKYGLEPYAVNFFYAQNSTQ

SEQ ID NO: 1135 - protein, 171 aa, Basidiobolus meristosporus CBS 931.73
MQSIKQAFTKAGIIPDVLQDTANATLLKVVYPGGKAVNLGEELSVEETQKQPEVHVDAKGDEKYTLIMSDPDAPSRKNPTLGEWRHWVVGNITGNDISKADAVTSYFGPAPPPGTGLHRYIFMLYQQNGAIPYEKLPEDPSQRGNFKTSDFVKQHNLKLVAANYFEAENKN

SEQ ID NO: 1136 - protein, 137 aa, Basidiobolus meristosporus CBS 931.73
GKEVDQGNELLISETQTQPQVSFDGLSDKLYTLIMADPDVPSRANPTLREFRHWVVGNIHSDDIDKGDIVTSYMGPATPPKTGYHRYQFMLYEQPGPINYEKLPEEKSQRLHFNSEAFVKENQLELVASNYFVAENK

SEQ ID NO: 1137 - protein, 271 aa, Bifiguratus adelaidae
MSSNNINLTPADNSTGPRISGPTEGFVFANHLNQTTGQVICGKPANVDWSGTHSNIVKLPQDSSQPPLHPSLINANASIGSDTFPASTDKQTSNMPLVTMNAHSTQPLKEAGIITDVIQDFTPATLIGGKFAKGGDIAMGNTLAINDTQEPPQIEFAGDREGAVYTVILTDPDAPSRQDPKWREFRHWVVTNVPSNGDVSKGTTIQDYMGPAPPKGTGPHRYVLLLYRQSGAFTEVPKLSEKRQNWKASTFAQQHEMTLVAANWFVAENKE

SEQ ID NO: 1138 - protein, 259 aa, Candida albicans SC5314
MFNRSIRISRSPLLRSRTILPRTFVTNTHRLSYRLKQRNPSTIFKQSAMTLITISQSLDEAYTKHKVIPEVVDQFDTQGLLSIEYGPTELVTLGNTLSVEGTQEVPKIQLTLNSPTEDGKIESISENDKFILVMTDPDAPSNSDHKWSEYLHWLVTDLKLPHTKNEDGEPEISHFIDVKEGRELVPYMGPGPPPKTGKHRYVFLLYKQDPNAGELTAPKDRPNWGTGVPSSGVKDWIEKNAPNSKLLSVNFFFAQNEDN

SEQ ID NO: 1139 - protein, 209 aa, Candida auris
MNLMTISQSLDEAYNKHSIIPDVVDKFDTQGLLTIEYSKEHHVTLGNTLKVADTQHVPTIQFTLNSPNQEKELQVNEEDKFTLVLTDPDAPTRGDKKWSEYAHWIVTDLPLNTNNAESEESLSTVLDISKGKELLSYVGPAPPEKTGKHRYVFLLYKQDPKANLVTPPDRPTWGTNVPGSGVRDYFKKHGGNSQLLAVNFFFAQNEVQE

SEQ ID NO: 1140 - protein, 235 aa, Candida auris
MFSIYRGALARQARPSLIIPKLRVPKMNLMTISQSLDEAYNKHSIIPDVVDKFDTQGLLTIEYSKEHHVTLGNTLKVADTQHVPTIQFTLNSPNQEKELQVNEEDKFTLVLTDPDAPTRGDKKWSEYAHWIVTDLPLNTNNAESEESLSTVLDISKGKELLSYVGPAPPEKTGKHRYVFLLYKQDPKANLVTPPDRPTWGTNVPGSGVRDYFKKHGGNSQLLAVNFFFAQNEVQE

SEQ ID NO: 1141 - protein, 211 aa, Candida dubliniensis CD36
MTLITISQSLDEAYTKHKVIPEVVDQFDTQGLLSIEYGPTELVTLGNTLSVEGTQDVPKIQLTLNSPTQDGKIESISENDKFILVMTDPDAPSNSDHKWSEYLHWLVTDLKLPHTKNEDGEPEISHFIDVKEGRELVPYMGPGPPPKTGKHRYVFLLYKQDPNVGELTAPKDRPNWGTGVPSSGVKDWIEKNAPNSKLLSVNFFFAQNEDN

SEQ ID NO: 1142 - protein, 209 aa, Candida duobushaemulonis
MNLMTISQSLDEAYNKHSIIPDVVDKFDTQGLLTIEYSKDHHVTLGNTLKVADTQHIPTIQFTLNSPNQEKELQVNSDDKFTLVLTDPDAPTRGDKKWSEYAHWLVTDLPLNTNNADSEESLSTILDISKGNELLSYVGPAPPEKTGKHRYVFLLYKQDPKANLVTPPDRPTWGTESPGSGVRDYFKKHGGSSQLLAVNFFFAQNEVQE

SEQ ID NO: 1143 - protein, 210 aa, Candida glabrata
MNYSVNTTQAIVDPLKKHEVIPDVVPDFEPQGFLTIEYPHSNSVTLGNDISVPMASSLPEITYTSTSGVSDPDNDRFIVVLTDPDAPSRTDHKWSEYCHYVRTDIQLVPNNKLASAAGAAGGVSREFVCADLNANGNTLVEYMGPAPPKGTGKHRYVFLLYRQNAPSSQLTKIKDRANWGYGEPAVGADKWAKENKLELLAANFFFAENA

SEQ ID NO: 1144 - protein, 200 aa, Candida glabrata
MNYSVNTTQAIVDPLKKHEVIPDVVPDFEPQGFLTIEYPHSNSVTLGNDISVPMASSLPEITYTSTSGVSDPDNDRFIVVLTDPDAPSRTDHKWSEYCHYVRTDIQLVPNNKLASAAGAAGGVSREFVCADLNANGNTLVEYMGPAPPKGTGKHRYVFLLYRQNAPSSQLTKIKDRANWGYGEPAVGADNRFIIIILQKS

SEQ ID NO: 1145 - protein, 241 aa, Candida glabrata
MNYSVNTTQAIVDPLKKHEVIPDVVPDFEPQGFLTIEYPHSNSVTLGNDISVPMASSLPEITYTSTSGVSDPDNDRFIVVLTDPDAPSRTDHKWSEYCHYVRTDIQLVPNNKLASAAGAAGGVSREFVCADLNANGNTLVEYMGPAPPKGTGKHRYVFLLYRQNAPSSQLTKIKDRANWGYGEPASFHYYNTSKVLGGKRTTKKKYNLLFGFENNRFLRRGHRNFGFFNNKLSFIKSFIKL

SEQ ID NO: 1146 - protein, 196 aa, Candida glabrata
MNYSVNTTQAIVDPLKKHEVIPDVVPDFEPQGFLTIEYPHSNSVTLGNDISVPMAGSLPEITYTSTSGVSDPDNDRFIVVLTDPDAPSRTDHKWSEYCHYVRTDIQLVPNNKLASAAGAAGGVSREFVCADLNANGNTLVEYMGPAPPKGTGKHRYVFLLYRQNAPSSQLTKIKDRANWGYGELPSAPTSGPRRTS

SEQ ID NO: 1147 - protein, 209 aa, Candida haemulonis
MNLMTISQSLDEAYNKHSIIPDVVDKFDTQGLLTIEYSKEHHVTLGNTLKVADTQKIPSIQFTLNSPNQEKELQVNSDDKFTLVLTDPDAPTRGDQKWSEYAHWLVTDLPLNTNNADSEESLSTVLDISKGNELLSYVGPAPPEKTGKHRYVFLLYKQDPKANLVTPPDRPTWGTNVPGSGVRDYFKKHGGSSQLLAVNFFFAQNEVQE

SEQ ID NO: 1148 - protein, 211 aa, Candida maltosa Xu316
MTLITISQSLDEAYTKNKVIPEVVDQFDTQGLLSIEYGPTELVTLGNTLPVDGTQEVPKIQLTLNSPTQDGKIESINEDDKFILVMTDPDAPSNKDHKWSEYLHWLVTDLKLSHTKDSNGEPEISHFIDAKDGRELVPYMGPGPPPNTGKHRYVFLLYKQDPSAQNLTAPKDRPNWGTGVPSSGVRDWIKKNAPNSKLLSVNFFFAQNEVN

SEQ ID NO: 1149 - protein, 274 aa, Candida orthopsilosis Co 90-125
MLNKLSSTAILKQLSIRRAITTQSLLKPIATTTFTRSLFYNQKFFNNRRYKQLTKSNTLLTSKMTLITISQSLDEAFTKNKIVPDVVDDFETQGLLSIEYGPTELVTLGNTLSVSGTQHKPKIQLTLNSPTEDGKIESINEGDKFILVLTDPDAPSNSDHKWSEYLHWLVTDIELPNLKTESGEPEISHFIDATQGKEIFKYVGPGPPPKTGKHRYVFLLFKQDPNTITIEAPKDRPNWGTGTPSSGVRDWIKANAPGSKLLAVNFFYAQNEDN

SEQ ID NO: 1150 - protein, 211 aa, Candida parapsilosis
MTLITISQSLDEAFTKNKIVPDVVDDFETQGLLSIEYGPTELVTLGNTLSVSGTQDKPKIQLTLNSPTEDGKIESINEGDKFILVLTDPDAPSNSDHKWSEYLHWLVTDITLPNLKTESGEPEISHFIDAAQGKEVFKYEGPGPPPKTGKHRYVFLLFKQDPKVSKFEAPKDRPNWGTGTPSSGVRDWIKAQAPGSKLLAVNFFYAQNEDN

SEQ ID NO: 1151 - protein, 209 aa, Candida pseudohaemulonis
MNLMTISQSLDEAYNKHSIIPDVVDKFDTQGLLTIEYSKDHHVTLGNTLKVADTQHIPTIQFTLNSPNQEKELQVNSDDKFTLVLTDPDAPTRGDKKWSEYAHWLVTDLPLNTNNADSEESLSTILDISKGNELLSYVGPGPPEKTGKHRYVFLLYKQDPKANLVTPPDRSTWGTEQPGSGVRDYFKKHGGSSQLLAVNFFFAQNEVQE

SEQ ID NO: 1152 - protein, 250 aa, Candida tropicalis MYA-3404
MFSRSIGLLTRSSLLRSQTLLSKLPLNRTTPSTFFKQSAMTLITISQSLDEAYTKSKVVPEVVDQFDTQGLLSIEYGPTELVTLGNTLSVEGTQKIPKIQLTLNSPTQDGKIESIGENDKFILVMTDPDAPSYTEKKWSEYLHWLVTDLKLPHSTNSNGEPEISHFIDVSEGRELVPYMGPGPPPKTGKHRYVFLLYKQDPNAGQLTAPKDRPNWGTGVPASGVRDWIKKNAPASKLLSVNFFYAQNADN

SEQ ID NO: 1153 - protein, 211 aa, Candida viswanathii
MTLITISQSLDEAYTKSKVIPEVIDQFDTQGLLSIEYGPTELVTLGNTLSVDGTQKVPKIQLTLNSPTQDGKIESIGANDKFILVMTDPDAPTYGDKKWSEYLHWLVTDLKLPHSTNSSGEPEISHFIDASEGRELVPYMGPGPPPKTGKHRYVFLLYKQDPAAEELTAPKDRPTWGSGVPGSGVRDWIKKNAPASKLLSVNFFYAQNEDN

SEQ ID NO: 1154 - protein, 179 aa, Choanephora cucurbitarum
MAEEIDYAAFKEHQVVPDVIPFEFRVSTELQISYPNSRQQVQLGNSLTPAEASEQPTVDFVPPQPSEKYTLVMTDPDAPSRTDPKFGPWRHWIVTNIDGQDVQKGLMDLNNHHTPYVGPGPPPNSGTHRYVFLLYRQRHEKNFAVMGTEREERRKFDLRAFETENELQLVSANFFICPT

SEQ ID NO: 1155 - protein, 206 aa, Clavispora lusitaniae
MTISQSLDDAYSKHKIIPDVVDKFDTQGLLTIEYSPERHVTMGNTLKVKDTQHVPTIQFTLNSPNQEEEMSVETDDRFTLVLTDPDAPSNTDHKWSEFCHWILSDLSLNPNNSGSGDSLSTVLDLSKGKEILPYVGPGPPPKTGKHRYVFLLYKQDPRANLVAPSDRPNWGTGTPGSGVRDWIKKHGGDSKLLAVNFFYAQNEVQE

SEQ ID NO: 1156 - protein, 230 aa, Clavispora lusitaniae ATCC 42720
MFAIYRAAPRLSRLPIFRRSTMNLMTISQSLDDAYSKHKIIPDVVDKFDTQGLLTIEYSPERHVTMGNTLKVKDTQHVPTIQFTLNSPNQEEEMSVETDDRFTLVLTDPDAPSNTDHKWSEFCHWILSDLSLNPNNSGSGDSLSTVLDLSKGKEVLPYVGPGPPPKTGKHRYVFLLYKQDPRANLVAPSDRPNWGTGTPGSGVRDWIKKHGGDSKLLAVNFFYAQNEVQE

SEQ ID NO: 1157 - protein, 210 aa, Cyberlindnera fabianii
MPLRPLLTISNSILESLKKEEIFEDVLPQFTPKGLLQVSYGGNNEVALGNTLSVAETQSKPKVQFVLDAPTNSSEEGVNITEQDRFTLVLTDPDAPSRTDKKWSEYAHFIASDISLKNTADAGADFLAAEIDLGAQGKELLEYVGPAPPAGTGKHRYVFLLYKQAGVSPQAPKDRPNWGYGSPATGVLKWSEEYSLEPWAVNFFYAENKG

SEQ ID NO: 1158 - protein, 248 aa, Cyberlindnera fabianii
MFHKRSAVSLLSVRNTLRLRTTTTRPVLALRQTPYNITMPLRPLLTISNSILESLKKEEIFEDVLPQFTPKGLLQVSYGGNNEVALGNTLSVAETQSKPKVQFVLDAPTNSSEEGVNITEQDRFTLVLTDPDAPSRTDKKWSEYAHFIASDISLKNTADAGADFLAAEIDLGAQGKELLEYVGPAPPAGTGKHRYVFLLYKQAGVSPQAPKDRPNWGYGSPATGVLKWSEEYSLEPWAVNFFYAENKG

SEQ ID NO: 1159 - protein, 237 aa, Cyberlindnera jadinii
MSFVKSSILRPLTRVTRFRYPAFNEHRIMPLRPLLTINNSIVESLKSNEVFEDVLPQFNVKGLLQVSFGGDNEVTLGNTLAVADTQKKPQFQFLANVDKDEVNALDEAEGSLFTLVLTDPDAPSRTDKKWSEYAHFVTTGITLQRTEGESSSFVAELDLGSQGKEILEYMGPGPPKGTGKHRYVFILFKQAKGVEPKPPADRPNWGYGTPATGIFKYAKEYSLEPWAINFFYAENKS

SEQ ID NO: 1160 - protein, 209 aa, Cyberlindnera jadinii NRRL Y-1542
MPLRPLLTINNSIVESLKSNEVFEDVLPQFNVKGLLQVSFGGDNEVTLGNTLAVADTQKKPQFQFLANVDKDEVNALDEAEGSLFTLVLTDPDAPSRTDKKWSEYAHFITTGITLQRTEGESSSFVAELDLGSQGKEILEYMGPGPPKGTGKHRYVFILFKQAKGVEPKPPADRPNWGYGTPATGIFKYAKEYSLEPWAINFFYAENKS

SEQ ID NO: 1161 - protein, 200 aa, Cylindrobasidium torrendii FP15055 ss-10
MSADPLTGVVDALKHASIIPDVVPDDFAPTVLFSIIFPNGKEVLTGQEWTVEDSLEEPNINFTPMQNTGSDDEPSYTLVMTDPDAPSRAEPIYREFRHWVITGLKAPALTSSETANPLATKPKASTTPYRPPGPRPKSGWHRYTFLLFQEPSGGFTIPQGAPEYGAELEQRRSWKAVDFGKQYGLTLVGATYFLVHSKDD

SEQ ID NO: 1162 - protein, 1262 aa, Dactylellina haptotyla CBS 200.50
MSNSSTHPELTARGNLLEPSSSLSKHLILENVESSDFHNFVQDRTRVESTNEFRDSRVLPLQNDSKTPLTTRIERNERQIGRYDNLSSVMQSPSGVGSQETTVTHSNVGSTRTTLLENSQNNPSRNEQNLGTSASSRVENIQKWDKNTSFAHENQVIGPGNAVLTENPTNPSLFNITRILRVGRKERYRRNEEQGLKKLKANDVASTLKILTKLQAPEAREYKTRLQHALFQHYCSQGLGYLTDKKPDVALQTLSKLPADEFISQKYREQLQDALLQYFATRGCEILEKDEMVPVATVISNLGLPQSEVYRQHVMAATLRRLRESYVAKAVEMMDQDDSATLSAIMSKIVGPESQVDRVKLQDDLFAQFYSRSLKYLGEGNLEKVLNMLPDYQDEGVLSYLKLLQDAIKQYFHSRIELGLLDAKYDDVKKYIQETKDLGFDFGDTFVLETKLAERMKHNAISTIKSSEMRRRVAQSSVGSNQDYMEPSVALPLLRQLYDFGYKHHADRVAQYLVGYCLKVASSHVRKRKAPWSAQFWIEFTDDLLRLLSDPLRQHATLKLEKISSLTINCMDTGQVPPVPASYKVNDRIWPRTLRMRSTVLWEIKQLYRHTICDMLPRLEKEYLRGVPATISYGGPSTKIPLTLEPGSYWGETQKKLLGSMSIESITLGTGAAENDPIQMKYIIISCHIAIRTITWPAAEKIRSLNGDRIEALGSEFQFLYYLSLAELAWLHDKDFDSALTQCRRAAVFDGSLESCIEGRRLDSEYFSSLIPPGYDFWRIYGVFGQILKHYAVRLQNGGTPRVKHIDRHILAKIVMASVHLDPKIAAGLIETLFFDNILTVWDENEAGNSMLAVPDGNEEISNFKFYPLEFQQFYAAIGRDDLLEVTLRRTTWITEPKRKDHRGMTTLYWAVKGLHGKAVEILLDPAHSIYHDELDPPLVRELNTQYSSTCLHILLATSSKKFIETPFRAILKIILDADHSFHFLDARDGFGRNAVHLLTSSLKKELSTLGISNLNILEIYLECYYIIFERLKSKDDVIGLRDAMDDYRNKAVEVTINQSIVEKYNRNPLLTLMLHKLKINYRLKNEGVIPDVIDEFSPSVFLQAEFTGGQEIQLGNTLKTKDTQDQPKVIITPGDASFESEDAKYTLCLTDPDAVSRDNPKWAEFCHWLVTDIKPRSGPLDIKDAKELVEYMGPAPPEETGKHRYVLLFFKNGKEKPKALEGRKKWGFEDKEPRIGARYYAKKYDLTLVGANFFFCQNEKQ

SEQ ID NO: 1163 - protein, 209 aa, Debaryomyces fabryi
MTISQSLDESYTKHKIIPDVVDKFDTQGLLTIEYNEQDHVALGNTLKVENTQHKPVIQFTLNSPGQENEFEISNDDKFTLVLTDPDAPSNKDHKWSEYAHWIVTDLPLNANSNDVEASESLTTVLDYSKGKEILSYQGPAPPPKTGKHRYVFLLFKQDPSVSKFETPKDRPNWGTGIPSSGVRDWVKKNGPELKLLGVNFFYAQNDVQE

SEQ ID NO: 1164 - protein, 249 aa, Debaryomyces hansenii CBS767
MFTASRSIIKNSTRIIPRTNSLLTRNRIPTYNNYKQAMNLMTISQSLDESYTKHKIIPDVVDKFDTQGLLTIEYNEQDHVALGNTLKVENTQHHPVIQFTLNSPGQENDFEISNNDKFTLVLTDPDAPSHKDHKWSEYAHWIVTDLPLNANSNDVESAESLTTVLDYSKGKELLSYQGPAPPPKTGKHRYVFLLFRQDPSVSKFETPKDRPNWGTGTPSSGVRDWIKKNGPESKLLGVNFFYAQNDTQE

SEQ ID NO: 1165 - protein, 240 aa, Drechslerella stenobrocha 248
MSAALLFRRALAASARTTPFLQHQNFLRPQISPSTPVFAPRVVRASQKMPLVTINQSIVEKLKQEGVIPDVIDEFSPSVFLQAEFPSGSEIQLGNTLEIKDTKDPPTVIITPGAAPFDSESAKYTLCLTDPDAASREDPKWAEFCHWLVTDIKPKSGTLDLKDAKELVEYMGPAPPEKTGKHRYVLLFFKNGKEQLKTPDGRKKWGYDDKDPRVGARYYAKKHGLTLLGANFFFCQNGVQ

SEQ ID NO: 1166 - protein, 204 aa, Eremothecium gossypii ATCC 10895
MNTIINFQEGSAQALSEHSIFPDVLVSTAENGPSGHLVVEYPGESTAVTLGNVMPVEATQTVPNLMLITTEPGIVREGDLFTLAMTDPDAPSRSDHKWSEYCHFLETNITLGSDDGVSHVVLKGTPQVEHMGPAPPAGTGAHRYVWLLFRQPGRLELSEEEVTRLQSRVNWGYTEKRPPVGVGEFAGEKNLELMAVNFFYAENK

SEQ ID NO: 1167 - protein, 204 aa, Eremothecium gossypii FDAG1
MNTIINFQEGGAQALSEHSIFPDVLVSTAENGPSGHLVVEYPGESTAVTLGNVMPVEATQTVPNLMLITTEPGIVREGDLFTLAMTDPDAPSRSDHKWSEYCHFLETNITLGSDDGVSHVVLKGTPQVEHMGPAPPAGTGAHRYVWLLFRQPGRLELSEEEVTRLQSRVNWGYTEKRPPVGVGEFAGEKNLELMAVNFFYAENK

SEQ ID NO: 1168 - protein, 186 aa, Fistulina hepatica ATCC 64428
MTEVIDLLKRDELIPTLLPESFVPSEDVTFSIVYPRLSFAPGQVVQLALTADEPQISITFANDSGNALYTLAMLDPDAPSRADPKFRSWRHWVITGLKPGKPYAIRTKPATTPYRAPKPPPGSGLHRYAFFLFREPESSFTISVGAAEYGDTLEQRRKWNATEFAKKYGLQLVGVTYFLTESSAAL

SEQ ID NO: 1169 - protein, 452 aa, Fistulina hepatica ATCC 64428
MFVRVGLRSVIKRGLLLSRTNATAAAVDTSPSIPPPSPPLSSSYQKETDHVDAKSSPDAPSTSKNADPASEKSQTHAEVPEKRTSKRKRPAISNATPRKWNPPMLAGRMPVYDLAVSYINKDARFVAGQAKQLQADIEVKEAQYQGQLKTLGPNPELEELDAQLEQMREKLNILDIQSQINLPAVRWRVRNSMVDVRNPVHLRLLEQRWRNEGDLDLLMERLHQMHVIPDVFPVLHPSVNLRVNFIPKGRILYRRRYDHNRIAVQPGRFLDAQQTNLPPHLFANVFHTETRLYTLLMVDPDVPDPTSESFTSYLHWLVPNIPLSASNGRMPRIPAKVPASYVPPHPQKGTPYHRYVLLLLPQPCAIDIAVISEEQRLGFDVRAFVKQYGLGLGDCIGTRTGGGAHMWRQVWDENVSWIYENVIKKSEPVYGRPPKYDEYEEFKNTPRYVAQN

SEQ ID NO: 1170 - protein, 212 aa, Galactomyces candidus
MPLITLGANIAQALKKNEVIPDVLDDFQPSGVITVSYGGSVEANLGNTLKVDETQSRPEIHASFTDPDASTAGSTYTLILTDPDAPSRTDKSYSEYLHHIVTGLKLKPINSGSTDPDQFSAADVAASFATPIDFSSGHELVPYMGPGPPPKTGLHRYIYILFKETKPSLTKFDGDRPRFGTDKPGYGVRSFAAEHGLIPVAVNFYYAQNEQQ

SEQ ID NO: 1171 - protein, 357 aa, Galactomyces candidus
MKASQTTMRATRRCLSTAADAATKSSFQIKNPAMRESILSGYKRLNGPLSLRSKAARLAYNTPIGLDEVFPLAHEIVKKYQSTQSAKAESLKEQLAQAGSSEEASKLKVELTKAQVRSQVDNPEVQYNFKIGQADFREPVYRYLAEQKWKEYDLLVLMQRLESLKVIPDTMPTLDPKAKVELQFSGSVNKWLVPGATIPCAVASRPPLVTIQEFEEIKDDSLYTLVIVDPDTPDLARDSFKTTLKWAVANIPLSNVEHFVDTDKATELVPYLPPTPEKNSGIHRHAVWAFRQNNGKVAEVAQELIERDGFDIRKFADELGLQAVGAHIWRNKFDRTTDGVREKYGLGAGRVFARVRR

SEQ ID NO: 1172 - protein, 186 aa, Gigaspora rosea
MLITAMESIASSLKQNAIIPDVIKIFIDEVVDEFVPEALLDITYDGKKVELGNKFTTAETNKAPKVNFAHSGSDTDNKSRFTLMMVDPDAPSRKQPDCREWRHWVVGNIPSDGNLSEATNLDSYQGPSPPQGSGHHRYVFLLYRQQDTHVYPQLDNEKRNNFKARQFAEQYGLKLISANFFECECV

SEQ ID NO: 1173 - protein, 179 aa, Gigaspora rosea
MLITAIESIIESLKKAGIIPDVVDEFKPEALLDIKYGEKKVELGNKFTIDETNKTPDVNFVFNKSDSDDKSRYILMMVDPDAPSPKNPTHREWRHWIVGNISSDGNLSEATHLDDYMGPSPPSETGEHRYVFLLYHQQVPHIDYPRLDKVKRNNFKARQFAEQYSLKLISANYFMCKRD

SEQ ID NO: 1174 - protein, 175 aa, Gonapodya prolifera JEL478
MSQFPKVKTAFQESGIIPDVIGDITPTIDLSIKYSEKIQATLGNELSPTDTQSAPHIILNDPHGSSSTRYVLAMVDPDAPSRESPSNAQYVHWVTEMAGSGTKPTVKRDLVQYMGPAPPSGTGFHRYVFLLYRHEGKVHFKSEPPKDRKNFNVAKWSQENGIGDPVGGEFYVAKT

SEQ ID NO: 1175 - protein, 183 aa, Hesseltinella vesiculosa
MLVMMDTAMSHALQTSGVIPDVVSPQFKNQGILTVNYGEEQVAIGNHLSVEQTAEAPKVMYVSGEESTHDYYTLMLVDPDAPSRADPKNGPWRHWVVTNIPEGQPDQVNASANQLTTYIGPSPPAGSGDHRYVFLWYKQLQGIQTFAPLSQSVHDRRSFNYSRYAQEQQLELLAVNFFFACKE

SEQ ID NO: 1176 - protein, 217 aa, Hyphopichia burtonii NRRL Y-1933
MNLLTISQSLDESYNKHKIIPDVVDKFDTQGLLTIEYNENDQVALGNTLKVENTQHKPTIQFTLNSPGLEKELEISKDDRFTLVLTDPDAPSNKDHKWSEYAHWIVTDLPLNENSESASSNAEGKEDSLSTILDYTKGKEILSYVGPAPPPKTGKHRYVFLLYKQDPKVYLLPAPPDRPNWGTGIPSSGVKDWIKKHGGKLQLLGINFFYAQNDDQD

SEQ ID NO: 1177 - protein, 195 aa, Kazachstania africana CBS 2517
MYSASETIAALNKEDIVKDVFYTDGDAFQPKGNLLVEYPTADTVVKMGNVLPTETTQVMPKVEFKPYDDFQLDLNATYSLIMTDPDAPSRTDHKWSEVCHYVETGITFESAQGGVISNKGLVRESYLGPGPPKGTGLHRYIFLLYKENNAKDHTFTEVKDRLNWGYGEPAVGVDKFAAANNLELLAANFFLAENK

SEQ ID NO: 1178 - protein, 187 aa, Kazachstania naganishii CBS 8797
MDALVEHEVLKDCFPSLGSQFTLQGELHVEFGPGNVVAMGNELTPTEAKTAPLHVIYTPNEDLDTGASYCLVVTDPDAPSRSDPRLSEICHAVQTGIRFTSPQGGAITGGDHVLPYIGPGPPKGTGLHRYVFLLFKELKTDHTQFTSIADRYYWGYGEKCRGAERWAAENNLELLSVNFFQSQNESN

SEQ ID NO: 1179 - protein, 201 aa, Kluyveromyces marxianus DMKU3-1042
MFASINSAKAIQESLVSHGVVSKVLPSFSSDGSGSLIIQYQSKHPVALGNTLSISNTQEKPELKLLSADADNAKIDTSALYTLCMTDPDAPSSSDNKWSEYCHYLETNLKLSPSAESPMALDLSSSSGDVLVPYMGPAPPKGTGPHRYVWILAQQSPDKAPGEIKDRPNWGFGKPGAGFQHYAEQFNLTPVAVNFFYAENK

SEQ ID NO: 1180 - protein, 266 aa, Komagataella pastoris
MLLGFQRFPKFHTLTTKSSINSIRSLRYNLQRPLLSPLFISPIIKQSMNLVTISDSIRENLIKHEVIPDVIEDKSFVPKGLLIISYGSPDKEVVLGNTLKVEEAQSIPKVTFTVNLNEEQEIASFFDEKFTLVLTDPDAPSRTDKKWSEFCHYIVSDLSLSTKSGTTDSEDKVNFTTDLKIDTIPESDPRTLIPYVGPGPPPKTGLHRYVFLLYKQKPGVSLEAPDPKNRPNWGTGIPGSGVSDWAAKNSLSLLAVNFFFAQNKDN

SEQ ID NO: 1181 - protein, 219 aa, Komagataella phaffii CBS 7435
MNLVTISDSIRENLIKHEVIPDVIKDKSFVPKGLLIISYGSPDKEVVLGNTLKVEDAQSIPKITFTVNLNEEQEIASFFDEKFTLVVTDPDAPSRTDNKWSEFCHYVVSDLSLSTKSGTTDAEDQVNFTTDLKVDTIPESDSKTLVPYLGPGPPPKTGLHRYVFLLYKQKPGVSLEGPDPKNRPNWGTGIPGSGVSDWAAKNSLSLLAVNFFFAQNKDN

SEQ ID NO: 1182 - protein, 266 aa, Komagataella phaffii GS115
MLLGFQRFPKFHTLTRKSPINSIRSLRYKFQRPLLTPLFLSPIIKQSMNLVTISDSIRENLIKHEVIPDVIKDKSFVPKGLLIISYGSPDKEVVLGNTLKVEDAQSIPKITFTVNLNEEQEIASFFDEKFTLVVTDPDAPSRTDNKWSEFCHYVVSDLSLSTKSGTTDAEDQVNFTTDLKVDTIPESDSKTLVPYLGPGPPPKTGLHRYVFLLYKQKPGVSLEGPDPKNRPNWGTGIPGSGVSDWAAKNSLSLLAVNFFFAQNKDN

SEQ ID NO: 1183 - protein, 188 aa, Laccaria amethystina LaAM-08-1
MAENISSLLNALKRDQVIPDVIPKSFAPSVLFSIVYPRVETGLGEPEILRNHTLPEPTIKILSDGGEGDKSFTLVLTDPDAPSRADPKFGEWRHWIVTGVKLPEGNANARLTSTATTPYEPPAPPVGTGLHRYVFLLFEEPASFSIPKGAIEHIATSKGRRSWNAGAFAEKYGLKLVGANFFVTQSQV

SEQ ID NO: 1184 - protein, 208 aa, Lachancea dasiensis CBS 10888
MNYAINVSQVATESLTTHSIIPDVVKSQDFKPWGLLAAEYSPSAPVAMGNTLSPEETQIKPKVHFTLDPKSEFKVQDADLFTLVITDPDAPSRTEKKWSEYCHYVETDIRLPFEYSHNTSSAVPDFVASELASGKPLMDYVGPAPPQGTGKHRYVFLLYKQPGDSSNFTKIADRPNWGFGIPATGVDKWATENHLQLIAVNFFFAENK

SEQ ID NO: 1185 - protein, 207 aa, Lachancea fermentati
MNQAINIAKTSAESLATHEIVPDVIKSSFSPWGLLAAEYAAGSPVAMGNTLTIDETQAKPKVHFTLDPQSQFEIRDSDLFTLVITDPDAPSRSDHKWSEYCHYVEADIRMPFAYSRASSSAVPDFVASELAGGHVLADYVGPAPPKGTGKHRYVLLLYKQSGPASQLSKIADRPNWGYGAPATGAHRWAAENGLELVAANFFYAENK

SEQ ID NO: 1186 - protein, 208 aa, Lachancea lanzarotensis
MNYALDISKVANDALHTHEIIPDVVKSSDFKPWGLLAAEYSASAPVAMGNTLTVDETQLKPKIHFTLDPKSEFKIKDSDLFTLVITDPDAPSRHDKKWSEYAHYVETDIRLPFEYQHGTSSPVPDFVASQLTNGKTFLEYLGPAPPSGTGKHRYVFLLYKQPGDSSSFTKIVDRPNWGFGTPATGADKWATENHLQLIAANFFHAENK

SEQ ID NO: 1187 - protein, 208 aa, Lachancea meyersii CBS 8951
MNYAINISQVATDALNTHNIIPDVVKAHDFKPWGLLAAEYSASAPVAMGNSLTVDETQSKPKVHFTLDPKSEFKIKDSDLFTLVITDPDAPSRTDKKWSEFCHYVETDIRLPFEYSHNTSSTVPDFVASELSNGKPLLDYIGPAPPSGTGKHRYVFLLYKQPGDSSSFTKIADRPNWGFGTPATGVDKWATENHLQLIAVNFFFTENK

SEQ ID NO: 1188 - protein, 208 aa, Lachancea mirantina
MNAAINVAETATESLKKHMVIPDVIKDQSFKPWGLLAAEYSPSSPIAMGNTLLVKDTQSKPKVHFTLDPQSEFKIRDQDLFTLVLTDPDAPSREDHKWSEYCHFVEADIRLPFEYAHNSTSAVPDFVSCELRGGRSIVEYQGPAPPKNTGKHRYVLMLFKQPNDSSKFTKIADRPNWGYGTAATGIHKMATENHLQLIAANFFYAQAD

SEQ ID NO: 1189 - protein, 253 aa, Lachancea nothofagi CBS 11611
MNYKTRVSFREKSQSSVNLSCKFDSWRNDNCTSAIESEHFFKVLQMNYAINVSQVATDALSTHGIIPDVIKASGFKPWGLLAAEYSASAPVAMGNTLNVEEAQLKPKVHFTLDPKSEFKIKDSDLFTLVITDPDAPSRTDKKWSEYCHYVETDIRLPFEYSHGTSSAVPDFVASELTNGKALVEYHGPAPPKDTGKHRYVFLLYKQPGDSSSFTKIADRPNWGFGIPATGVDKWATENHLQLIAANFFLAQSK

SEQ ID NO: 1190 - protein, 285 aa, Lachancea quebecensis
MFLLRLSLFLRQSRQAPDSPVRQIKFAKSSMVTIVVSKGSRFRYIKARAFSTGIRTDIVPNIHNFCHPFQLQHSRKMNYAINVAQAASDSLTTHEIIPDVVQDKSFKPQGLLAVEYSAAAPVAMGNTLTVEETQSKPKFHFTLDPKSEFKIKDADLFTLVMTDPDAPSRTDKKWSEFCHYVAADIRLPSEALHSTTSATPDFVASELSGGKTLVEYHPPGPPKGTGKHRYVFLLYKQPGDSSSFTKVADRPNWGFGSPATGVHKWASENHLELIAANFFFAENKQ

SEQ ID NO: 1191 - protein, 208 aa, Lachancea sp. CBS 6924
MNYAVDISKVATDALHTHDIIPDVVKSNDFKPWGLLAAEYSASAPVAMGNTLAVEETQLKPKVHFTLDPKSEFKIKDSDLFTLVITDPDAPSRTDKKWSEYAHYVETDIRLPFEYQHGTSSPVPDFVASQLTNGKSLLEYQGPAPPSGTGKHRYVFLLYKQPGDSSSFTKIVDRPNWGFGTPATGVDKWATENHLQLIAVNFFFAQTK

SEQ ID NO: 1192 - protein, 208 aa, Lachancea thermotolerans CBS 6340
MNYAINVTQASSDSLTTHKIIPDVVQDKSFKPQGLLAVEYSAAAPVAMGNTLTVEETQSKPKFHFTLDPKSEFKIRDADLFTLVMTDPDAPSRTDKKWSEFCHFVAADIRLATETSRSTSSAVPDFIASELSGGKTLVDYHPPGPPKGTGKHRYVFLLYKQPGDSSAFTKIADRPNWGFGSPATGVHKWASENHLELVAANFFFAESK

SEQ ID NO: 1193 - protein, 183 aa, Lichtheimia corymbifera JMRC:FSU:9682
MPLLTTDMNLKGALQKANLIPEVISESFSPSTLLQVTYPNDREVTLGNTLTTDETSQTPEIFFVPPEPEASYTLIMTDPDAPSTTDHQYGPWRHWIAVNISGSNVADIKEHHTPYIGPGPGPNTGLHRYLFLLYKQPSPNQSFQAMAHENKPDRRCFDLTKFVSEHQLELVAANFFLCANSSN

SEQ ID NO: 1194 - protein, 250 aa, Lichtheimia ramosa
MVQITSLFSSAAAFLLLGTLGACQQQWNGPLNRAIVEQQLSDLKEARVIPDVLPEFEPTSFIKLMYDDKPVVNAGDIIYPHQAINPPHVWFPAPNEDAHYTLVLVDADAHVPLVRHWVVENVPGGKPGSSIRDNIPYTPYHGPTPPALTGKHRYVFALYEQPMANQSLVPPILGDPDRHRAFFDLDKFVHENNLTLVAATYVQAEHEPGYEGRGRAPSSAIEAASSSNAVSMEASSISLMSSASAASSAV

SEQ ID NO: 1195 - protein, 183 aa, Lichtheimia ramosa
MPLLTTDMNLKGALQKAKLIPEVINESFSPSTLLQVTYPNDREVTLGNTLTTDETSQAPKIFFVPPEPEASYTLIMTDPDAPSTTDHQYGPWRHWIAVNIPGSNIQDIKEHHTPYIGPGPGPNTGLHRYIFLLYKQASTTQNFQSMAHENKQDRRCFDLNKFVSEHQLELVAANFFLCANANN

SEQ ID NO: 1196 - protein, 183 aa, Lobosporangium transversale
MPLITSDQATESALKKDGIIPDLLDSFQPKTMLVISYGDGLEVALGNTLPVKDTQNPPQISFQVENPDDKYTLILTDPDAPSRANPKNREFRHWTVTNISGASDFQPADVSQGNVLTEYMGPAPPAGSGPHRYIFLLFKQTSSSDASALTTPLTDRPKFNTKEFTSQAGLELVGANYYFAENP

SEQ ID NO: 1197 - protein, 268 aa, Lodderomyces elongisporus NRRL YB-4239
MFRRGCSRLFKQSSHRSHPIDFSLKRNLTYLSQPQFRTSIYTPHFVNSNTSLHRNSKMTLITISQSLDESYTKNEIIPDVIDEFETQGLLSIEYGPTELVTLGNTLAKASTQEPPKIQLTLNSPTEDGKIESISPDDKFILVFTDPDAPSRTDHKWSEYLHWLVTDLKLPDTKTESGEASISHFINAKDGHELFPYVGPGPPPKTGKHRYVFLLYKQDPDVEKPEAPKDRRNWGTDVPGSGVRDWIKKAAPNSKLLAVNFYYSQNEDP

SEQ ID NO: 1198 - protein, 185 aa, Marssonina coronariae
MSLGTYSEDVVASLTAANIAPGSTALIPQDFKPSIRLNLKYGDKDVSLGTVLRTSETKTAPRFSFDDGRAGGSYTLLLVDPDAPTPEEPRFAYWRHWIVTGLSGASGEDVPTLTEYLGPGPKDESASRHRYLFLLLREPEGFAVTRADVGGEMFVERRSFEAAQWVEKHGLVLVGVNWFSGVGDS

SEQ ID NO: 1199 - protein, 391 aa, Melampsora larici-populina 98AG31
MIYLKMTSTNHFNRCLISYSSYLRNQSKRINFNYSTTSNNVGPSTLPQEPPTNLPLRTPRQPIVRPGVIPAYDEAIAFLKQNSKQLELKLGELQLKLKENPNDENLKKTITKLEIESQINDVNVRVRHKAGLGDMSKAVYRHLKEKEWREAGRLGRLMETVHRLRVFPDILPAIAPTADLRANFQNTPISVGTFISASKSITPPTIRVQVFHPEGELYTLMMVDPDVPDPSNQSFTPYLHWLVPNLPISATSSPELAIDETNLTQLSYIPPHPARGSSLHRYTLLLFKQSSKLDSLPELNRLGFSARDWIQSTNMQASGVISWTCKWREQESKLISNIYKNHLNIPEPYYGRTPKPYSGHARLAPYTPLPLTHRHPPVIPWEKSVEVNKDT

SEQ ID NO: 1200 - protein, 241 aa, Meyerozyma guilliermondii ATCC 6260
MLNCLRTGFIKHKVAYRSIPRFNLSKHTPSRVSAMTLVTISQSLDEAYVKHKIIPDVVDKFDTEGLLTIEYNGKDQVALGNTLKVAETQERPTIQFTLNSSGQEEEMSVADKDRFTLILTDPDAPSNTDHKWSEYAHWIVTDLPLNATGKDAESLSTILDYKKGKEILPYVGPAPPEGTGKHRYVFLLYKQDPAASLAAPKDRPNWGTGVPSSGVRDWIKKNGGKSQLLGVNFFYAQNEKQ

SEQ ID NO: 1201 - protein, 241 aa, Meyerozyma guilliermondii ATCC 6260
MLNCLRTGFIKHKVAYRSIPRFNLSKHTPSRVSAMTLVTISQSLDEAYVKHKIIPDVVDKFDTEGLLTIEYNGKDQVALGNTLKVAETQERPTIQFTLNSLGQEEEMLVADKDRFTLILTDPDAPSNTDHKWSEYAHWIVTDLPLNATGKDAESLSTILDYKKGKEILPYVGPAPPEGTGKHRYVFLLYKQDPAALLAAPKDRPNWGTGVPSSGVRDWIKKNGGKLQLLGVNFFYAQNEKQ

SEQ ID NO: 1202 - protein, 207 aa, Meyerozyma sp. JA9
MTLVTISQSLDEAYVKHKIIPDVVDKFDTEGLLTIEYNGKDQVALGNTLKVAETQERPTIQFTLNSSGQEEELSVAEQDRFTLVLTDPDAPSNTDHKWSEYAHWIVTDLPLNATGKDAESLSTILDYKKGKEILPYMGPAPPEGTGKHRYVFLLYKQDPAASLTAPKDRPNWGTGVPSSGVRDWIKKNGGKSQLLGVNFFYAQNEKQ

SEQ ID NO: 1203 - protein, 246 aa, Millerozyma farinosa CBS 7064
MLNICKSVIRRPACSLTRGNQLSFRNPIARNFPARMNLVTISQSLDEAFTKHKIVPDVVDKFDTQGLLTIEYNPKDHVALGNTLKVSNTQNEPTIQFTLNSSGQEKELEVSEQDKFILIMTDPDAPSYTDKSFSEFAHWVITDLPLNANKDNSESAESLSTILDYSKGRVLVPYMGPGPPPKTKKHRYVFLLFKQDPEGKFEAPKERARWGTGVPGSGVRDWIKAHGPNSKLLGINFFYAQNEVQE

SEQ ID NO: 1204 - protein, 184 aa, Mortierella elongata AG-77
MPLITSEQATEAALKQEGIIPDVLDSFHPKTILMVSYGSNNEVALGNTLSVEDTQQAPQVSFQAESPSDQYTLIMTDPDAPSRKDPKMREYRHWVVANISGTSDFQPANVAQGSVVTSYMGPAPPAGSGPHRYIFLLYKQTPSTNISALTTPLGSHRQGFKAKHFSSQAHLELVGANYFFAENP

SEQ ID NO: 1205 - protein, 215 aa, Mortierella verticillata NRRL 6337
MPRGLSCSNTFLSLFSPSSNTTLPNHATYTSMPLVTSDQATEISLKQDGIIPDVIDSFQSKTLLVLSYGNGKDVTLGNKLAVADTQHPPQVSFQSDSPNDKYTLIMTDPDAPSRKDPKFREWRHWVVTNISGASDFQPANVCHGTALTPYMGPAPPHGSGPHRYVFLLYKQVPGSNVAVLSAPLGDNRQSFRAKQFSGQAHLELVGANYFFAENA

SEQ ID NO: 1206 - protein, 196 aa, Mortierella verticillata NRRL 6337
MAVPPSAKSLTSAVAALRKEEIIPEVVSEFEARTTLAINYGNYNNAFLGNRLTIANTQDAPQVYFYSDSPTNKYTLIMTDPDAPSRKFPKLREYCHWVVSNIPAPTPGQPAELAKGVVLLPYMGPAPPPETDLHRYTFLLYKQPATATAANTETLYTRLPEKRHRFKARDFAARAGLELVGANFFQAEHTSPTSRL

SEQ ID NO: 1207 - protein, 186 aa, Mucor ambiguus
MPLVTMDMNLNTSLKKAEISPNIVPENFTPSTLVSATYANGEDVALGNFIKPSESADIPKVTFIAPDETAEYTLLVVDPDAPTKEDPKWGPYRHWVITNIPGKLRVMLTSGDLSKGNALAPYMGPAPPPKTRDHRYIFLLYKQPRTQADFGTLAKESNNWDFKAFVNQHDLELIGVNFFISRNDDN

SEQ ID NO: 1208 - protein, 179 aa, Mucor circinelloides f. circinelloides 1006PhL
MPLVTMDMNLNSSLKKAEISPNIVPENFSPSTLVSATYANGEDVALGNFIKPSESADVPKVTFVAPDETAEYTLLVVDPDAPSKEDPKWGPYRHWVITNIPASGDLSKGNALAPYIGPGPPPKTRDHRYIFLLYKQPRTQADFGTLAKESNNWDFKAFVNQHDLELIGVNFFISRNDDN

SEQ ID NO: 1209 - protein, 179 aa, Mucor circinelloides f. lusitanicus CBS 277.49
MPLVTMDMNLNSSLKKAEISPNIVPENFTPSTLVSATYANGEDVALGNFIKPSESADTPKVAFIAPDETAEYTLLVVDPDAPSKEDPKWGPYRHWVITNIPASGDLSKGNALAPYMGPAPPPKTRDHRYIFLLYKQPRTQADFGTLAEESNNWDFKAFVNQHNLELIGVNFFISRNDDN

SEQ ID NO: 1210 - protein, 210 aa, Nadsonia fulvescens var. elongata DSM 6958
MPLVTINSSIQESLKKHEIVPDVIDDGFNPSCLLTISYTKEIGVSMGNNLKPSETKNIPDVFVATDYTPSEKSNASSSNSEPKYTLVLTDPDAPSRTEKKWSEFCHYIVTGLTIPTDPKSGVSLGKLDISKGSTLMPYCGPAPPPKTGKHRYVFLLYKEPQVSHGVLMKPPRDRPTWGTDVPASGVRDWAKKYNLELAGVNFFYAQNDEQ

SEQ ID NO: 1211 - protein, 204 aa, Naumovozyma castellii CBS 4309
MNYSLDLNKATLDGLTKHEVIKDVIKDPHWKPWGILSAEFENSNETVAMGNTLAPNQTDQRPTVQFVLNEPTKKINEADLFTFVITDPDAPSRHDHKWSEYCHYVETDIKLDGFTRDADFLASEVDQGKQLMSYVGPAPPKGTGLHRYCLLFFKQPNGVASDKFTKIKDRPNWGFGTPATGVHKWATENKLELIAANFFFAENK

SEQ ID NO: 1212 - protein, 201 aa, Naumovozyma dairenensis CBS 421
MEYSININKAAIDGLSKHDILKDVVKDPNFQPKGILSAEFNSSNSTVAMGNTLSVEATASKPQVQFILNDSVKDINEDDHFTLVMTDPDAPSRTDKKWSEFCHYVETNIKLDGFARDSEFLASEISNGHEMMPYKGPGPPKGTGPHRYVLLFYKQTPGVTLTKVKDRPNWGYGQPAVGVHKWASENKLSLLAVNFFFAETK

SEQ ID NO: 1213 - protein, 214 aa, Ogataea parapolymorpha DL-1
MRLVTISNSIKDALTKSEVVPTVIHSDSFTPKGFLIISYGQDKEVAMGNTLSVKDTQHRPDFAFTLNLSKDTDPDFSISSSDRFTLVLTDPDAPTKGDEKWSEFCHYVVKNIKLNDFDPNKSVDISQIEEQLTTSNLNGEDLVPYMGPGPPPKTGKHRYVFLLYKQKPGVEPEAPADRPCWGTGVPGWGAEEWSQKNELQLLAVNFFYAQNEEQ

SEQ ID NO: 1214 - protein, 262 aa, Pachysolen tannophilus NRRL Y-2460
MNFRIATSVLKTNSSIGSSRILSSISGANSLTPLVSTSFAKNKLSFNYQSRMNLLTISNSIKESYIKHGIIPDVIADKNFDPKGLLIISYGKDKEVTLGNTLAVDETQSLPKIAFTLNVSDKNGFEVDTNDAFTLVLTDPDAPSRTEKKWSDFCHYVVSDLKLNPISTSEVGDNVKNLTTDLEFDKGTTLIPYKGPGPPPGTGKHRYVFLFYKQKKGVSPKPPSDRPNWGTGIPAFPAEKWAAKYDLELLSANFFLAQNKEQ

SEQ ID NO: 1215 - protein, 183 aa, Phycomyces blakesleeanus NRRL 1555(-)
MPLITTSMNIDLSLKKARIIPDVIREEFVPSTLLEINYPNGKDVALGNTLSVQDTAEPPRVNFVPPEEDAQYTLVMADPDAPSAVDPSLGPWRHWVVTNIKGSDPSNIKASSEHTPYMGPAPPAGTGDHRYVFLLYKQPRTNQEFAAMSPEKTSVRRNFDVNEFATKNDLELISVNYFLSSVN

SEQ ID NO: 1216 - protein, 237 aa, Podospora anserina S mat+
MTLYSLLLHLFILIGPFAAGAIVIVNEQHPLPKTGNSIWNTQDDVQKALQDAEIIPTVIDDFLPSLLMNATWSSHHHTHADLGNTLEPSLLESAPSVKLMASKPTLWKKGVTYVIAMTDPDAPSRDDPKWSEFCHWIAIGVPTSSGISPTFSDEIMGYKPPSPPEKTGKHRYVLLAFAPANGTTEKLHLSRPSARKHWGYDVGNDGDKDTKGVREWAAENGLVPVGANFFYAQNKKH

SEQ ID NO: 1217 - protein, 237 aa, Podospora comata
MTLYSLLLHLFILIGPFAAGAIVIVNEQHPLPKTGNSLWNTQDDVQKALQDAQIIPTVIDDFLPSLLMNATWSSHHHTHADLGNTLEPSLLESAPSVKLMASKPSLWKKGVTYVITMTDPDAPSRDDPKWSEFCHWIAIGVPTSSGISPTFSDEIMGYKPPSPPEKTGKHRYVLLAFAPANGTTEKLHLSRPSARKHWGYDVGNDGDKDTKGVREWAAENGLVPVGANFFYAQNKKH

SEQ ID NO: 1218 - protein, 137 aa, Protomyces lactucaedebilis
VNYGNALDLNVTSFAPLINFTGSANVRYTVAMVDPDAPTPQNPTSAQIRHWLVTDVQASTAPTNISSGNVLSGYRAPSPPAGSAPHRYAFFLLQQPAGANITLGNQSAIQNFNLAAFITLNRLTVVSGNYFNASRTN

SEQ ID NO: 1219 - protein, 204 aa, Psilocybe cyanescens
MTDNQATDTIRLLKAGRVIPDVIPTSSNFSPDVFFSIIWPSNGTEVTEPGSTVPKGLTNDEPQIKLLPTFVSNDEALYTIVMTDPDAPSRVDPKFGEWRHWILSGLTSPRAELASSSQGQILKKSKSTITPYYPPEPPAGSGPHRYVFLLFREPAGGIAIPDDAVERKAESGNRSKWNAMAFAHQYDLKLVGANFFLTEVKTHG

SEQ ID NO: 1220 - protein, 235 aa, Pyronema omphalodes CBS 100304
MSLCHNILRNVNSVLLFSSLSRCGVRASISRSPRIVPQIRPLVTLNESLRETFKKHGIIPQVVDDFTPTALLSVTYPKVEVSVGNTISPEDTQDEPVIRVTPAKAKPNGDKPGEPAIYTIVLTDPDAPSRENPKNAEFCHWIQTGLTADDTIFYSKSRALMKYMGPAPPPKTGKHRYVFLLYRGSNKDLQEPKDRVRWGNPEQKKGVTVGVRKWAKEGGLELVGANFFYAQNKEQ

SEQ ID NO: 1221 - protein, 377 aa, Rhizophagus clarus
MFLLSHRVRRTIITTSLNTLTRIYKPQELQISFLNFRQLTTVQRKKDENLSQKASVKKYKPPALGVNPAYDEALKYIYQDKAQKYEEIANIDIMIEKILNGRRNFESSEQREQELNELRKKKYDLQVLAEINDPEVRWNFKNGKIDMNIPVYRHLREKHWRKEPLYKLMQRITQMYVVPDIFPTLEPTIDLEFKFKNDVIEPGVFLFPAQTKKEPKVTLTNFHEETRLYTLIMVDPDMPDVPNNAYQTEWHWLITNIPLNVTKSDVSSGEVILPYVPPHPPKGTKYHRYTLAILEQPDNQKIIIPENMGRVKDVREFMSEHNLTLRGASFFREVWDEEVSNIYANILDVHEPQYGRRPKVDQYLDETGLKQQKYTNF

SEQ ID NO: 1222 - protein, 179 aa, Rhizopus azygosporus
MVLITADMNIANALKKAEISPNIVPEGFSPSTLLSIRYPKGEDVALGNFIKPSDSAETPNISFVAPDSDAQYTLLLIDPDAPSKQDPKWGPYRHWVVVNIPGSADFMAANQLTSYMGPAPPPKTGDHRYIFLLYKQPSINSNFNALSQDASCFDYKSFVQQNGLELVSVNFFVSRNDDN

SEQ ID NO: 1223 - protein, 177 aa, Rhizopus delemar RA 99-880
MAVFVACDASFSRALKKAEIMPEFVPNGFSPSVKLSIVYPNKKVDLGNFIAPSESVEAPRISFANSDRHSQYTLLLIDPDVPTKEDPSNGPFRHWAVVNIPSSGNLAVAGQLSTYIGPQPPVNSGYHRYIFLLYKQASVNKLFQSLPTNRTFFDYNTFAQQNDLKLVSTNFFMSADI

SEQ ID NO: 1224 - protein, 167 aa, Rhizopus delemar RA 99-880
MVLITSDMNISNALKKAEIMPNNIKYSSGEDVALGNFIKPSDSAEAPKVNFIAPDKDSQYTLLMVDPDAPSKENPKLSPYRHWVVVNIPSSTDFAAASQMASYIGPAPPPNTHDHRYIFLLYKQPAKYSNFQALSEEPSKFDYKAFVQNNKLELVSVNFFISRNENN

SEQ ID NO: 1225 - protein, 179 aa, Rhizopus microsporus
MVLITADMNIANALKKAEISPNIVPEGFSPSTLLSIKYSKGEDVALGNFIKPSDSAETPNISFVAPDSDAQYTLLLIDPDAPSKQDPKWGPYRHWVVVNIPGSADFMAANQLTSYMGPAPPPKTGDHRYIFLLYKQPSTNSNFNALSQDASCFDYKSFVQQNGLELVSVNFFVSRNDDN

SEQ ID NO: 1226 - protein, 179 aa, Rhizopus microsporus
MVLITADMNIANALKKAEISPNIVPEGFSPSTLLSIKYPKGEDVALGNFIKPSDSAETPNISFVAPDSDAQYTLLLIDPDAPSKQDPKWGPYRHWVVVNIPGSADFMAANQLTSYMGPAPPPKTGDHRYIFLLYKQPSTNSNFNALSQDASCFDYKSFVQQNGLELVSVNFFVSRNDDN

SEQ ID NO: 1227 - protein, 179 aa, Rhizopus microsporus
MVLITADMNIANALKKAEISPNIVPEGFSPSTLLNIKYSKGEDVALGNFIKPSDSAETPNISFVAPDSDAQYTLLLIDPDAPSKQDPKWGPYRHWVVVNIPGSADFMAANQLTSYMGPAPPPKTGDHRYIFLLYKQPSTNSNFNALSQDASCFDYKSFVQQNGLELVSVNFFVSRNDDN

SEQ ID NO: 1228 - protein, 179 aa, Rhizopus microsporus ATCC 52813
MVLITADMNIANALKKAEISPNIVPEGFSPSTLLSIKYPKGEDVALGNFIKPSDSAETPNISFVAPDSDAQYTLLLIDPDAPSKQDPKWGPYRHWVVVNIPGSADFMAANQLTSYMGPAPPPKTGDHRYIFLLYKQPSTNSNFNALSQDASCFDYKSFIQQNGLELVSVNFFVSRNDDN

SEQ ID NO: 1229 - protein, 219 aa, Saccharomyces arboricola H-6
MNQAIDFTQASIDSYRKHGILEDVIHDTSFQPSGILAVEYSSSAPVAMGNMLTTDKAHSRPQFQFTFNKQMQKNTAQADAFVPQADDLFTLVMTDPDAPSKTDHKWSEFCHLVECDLKLLNQSTHETSGTADFFASEINSSGSNTLVEYMGPAPPKGSGPHRYVFLLFRQPKGVSSSKFSKIKDRPNWGYGTPATGVYKWAKENNLQLVASNFFYAETK

SEQ ID NO: 1230 - protein, 201 aa, Saccharomyces cerevisiae x Saccharomyces kudriavzevii VIN7
  misc_feature (27)..(27): Xaa can be any naturally occurring amino acid
  misc_feature (159)..(160): Xaa can be any naturally occurring amino acid
MSSAIVAKLNKEDIIKDTVKDLAFEIXGELSVSYVDSDDIKLGNAMPMEATQAAPTIKFTPFDKSQLSAEDKLALLMTDPDAPSRTEHKWSEVCHYIITDIPVEYGPGGDIAISGKGVVRNNYIGPGPPKNSGYHRYVFFLCKQPKGADSSTFTKVENXXSWGYGTPGAGAYDYIKENNLQLVGANYYMVENTTVDFNYDM

SEQ ID NO: 1231 - protein, 219 aa, Saccharomyces eubayanus
MNQAIDFTKVSIDSFKKHGILEDVIHDTSFLPTGILAIEYTSNAPVAMGNTLSTDKTQSKPQFQFTFNKQMQKNTPQADVYVPQDDDLFTMVMTDPDAPSKTDHKWSEFCHLVESDLKLQNKSTHETSGATDFFASEFNSAGSRTLIEYMGPAPPKGSGPHRYVFLLFKQPKGVDSSKFSKIKDRPNWGYGTSATGVYKWAQENNLKLVASNFFYAETK

SEQ ID NO: 1232 - protein, 201 aa, Saccharomyces kudriavzevii IFO 1802
MSSTIVAKLNKEDIIKDTVKDLALDILGELSVSYAATDDVQLGNSMPMDATQSAPTIKFMPFNKSQLSADDKLALLMTDPDAPSRTDHKWSEVCHYIVTDIPVEYGPEGEIAVSGKGTVRSNYIGPGPPKNSGYHRYVFFLCKQPKGADSSAFTKVENIISWGYGNPGAGAYDYIKENSLQLVGANYYMVQNTTVDFNYDM

SEQ ID NO: 1233 - protein, 204 aa, Saccharomycetaceae sp. 'Ashbya aceri'
MNTIINFQEGSAQALSEHSIFPDVLVPSAEKGPSGHLVVEYPGESSAVTLGNVLPVEAAQTVPNVMLITTEPGKVKEGELFTLAMTDPDAPSRSDHKWSEYCHFLETNVTLGSDDGVSHVVLKGNPQVEHMGPAPPAGTGAHRYVWLLFRQPGRLELSEEELARLQSRINWGYSEKRPPVGVGEFAGEKNLELVAVNFFYAENK

SEQ ID NO: 1234 - protein, 195 aa, Saitoella complicata NRRL Y-17804
MPLVTINTSIIESLKKAGVIPDVLDPFDATAMVNVTYGNKDVTLGNKLSVDETQKQPDLRIIPEGEDDATYSLILTDPDAPSREDPKWAQYIHWGVSGVKFGNIESFAAKAAESGELGPIDFSGFKTLKPYEGPAPPEKTGFHRYCFILLREPASGKVPELPKERKQWEGVREWAKKGELEPVGANFFYCQNDKQ

SEQ ID NO: 1235 - protein, 263 aa, Saitoella complicata NRRL Y-17804
MEDVLAVAGAVAVGDEIRHGPSCKARLDNHNVPSNVTKDNTNIQMLRILRCVRPSINYHHIPINRTQRMPLVTINTSIIESLKKAGVIPDVLDPFDATAMVNVTYGNKDVTLGNKLSVDETQKQPDLRIIPEGEDDATYSLILTDPDAPSREDPKWAQYIHWGVSGVKFGNIESFAAKAAESGELGPIDFSGFKTLKPYEGPAPPEKTGFHRYCFILLREPASGKVPELPKERKQWEGVREWAKKGELEPVGANFFYCQNDKQ

SEQ ID NO: 1236 - protein, 213 aa, Scheffersomyces stipitis CBS 6054
MPLITISQSLDEAYTKHKVVPEVVDAFETQGLLTIEYNGEDSVALGNTLKVARTQNKPIIQFTLNSPNQEGIVESISDEDKFILVMTDPDAPSNTDHKWSEYLHWLITDLKLTNVKKSDSDSEPEISHILDYSKGVELFSYMGPGPPPKTGLHRYVTLLYKQDPNVSKLEAPLDRPNWGTGIPSSGVRDWIKKVAPGSKLLGVNFFYAQDEDN

SEQ ID NO: 1237 - protein, 200 aa, Scleroderma citrinum Foug A
MIDSYSAVVSALTAGDIIPEVIRLPFNPSARLVVSWPTSDKEASLGNTLTAPETALEPSVAFTPMITQAPYDEVSYTLVMTDPDAPSRKDPKFAQWRHWLVTGVKAPYPTNLDTGDLTAHFTQPATTPYYCPAPPPGSGPHRYVLLLYREPAIGVTIAPTAPERKNLPKDRGQWDAAVFAEEYGLELVAANFFYVEGPES

SEQ ID NO: 1238 - protein, 233 aa, Smittium culicis
MKFLSLAVISAAVSSFVASQTFNSAAIYEALDEGDIIDDVLPESFAPITNLDVTYANRQMTFGNEYFPYNNETDTFPTVNYNSNANDLYTLALVDPDAPSRANPTRAQVVHFLSINIKGNDTQSGYSGSLTYLPTRPFVGCGRKRFVFVLARQAGVLANSVVPASRPGFNIANFAAQNQLTLIGANYFEAESTPGPQCVIPVASSPSSAYKISSGFAKAFTVAAAISLISTII

SEQ ID NO: 1239 - protein, 277 aa, Smittium culicis
MKFLSLAVISAAVSSFVASQTFNSAAIYEALDEGDIIDDVLPESFAPITNLDVTYANRQMTFGNEYFPYNNETDTFPTVNYNSNANDLYTLALVDPDAPSRANPTRAQVVHFLSINIKGNDIQSGYSGNLTYLPTRPFVGCGRKRFVFVLARQAGVLANSVVPASRPGFNIANFAAQNQLTLIGANYFQAESTPGPQCIIPVASPSASASPAATASPSVSASPAATTSPSGSASTSSIGSSTSGSSSSSSSSAYKISSGFVKAFSVAAVISLISIVI

SEQ ID NO: 1240 - protein, 323 aa, Smittium culicis
MKFLSLAVISAVVSTFVASQTFNSAAIYEALDEGDIIDDVLPESFTPITNLDVTYANRQMTFGNEYFPYNNETDNFPTINYNSNPNDLYTLALVDPDAPSRANPTRAQVVHFLSINIKGNDIQSGYSGSLTYLPTRPFVGCGRKRFVFVLARQAGVLPNSVVPASRPGFNIANFAVQNQLTLIGANYFEAESTPGPQCIIPVASSSASPAPVSSTVSATSATSATSATSATSATSATSATSATSVTSVTSVTSVTSATSATSATSAATATPSRSSSSSSSSSSSSSSSSSRSSSSSSSAYKVSSGLYKAFSVAVFVCLISAMI

SEQ ID NO: 1241 - protein, 303 aa, Smittium culicis
MKFLSLAVISAAVSSFVAAQTFNSAAIVEALDEGDIIDDVLPESFTPITTLDVTYANRPMNFGNEYFPYNNETDTFPTVNYNSNANDLYTLALVDPDAPSRANPIRAQVVHFLAINIKGNDIQSGYSGNLTYLATRPFVGCGRKRFVFVLARQAGVLANSVVPASRPGFNIANFAAQNQLTLIGANYFEAESTPGPECIIPGASPSASASASASATASPSGSASASATESPSGSSSASPSATTSSSRSASTSPTGSSSSSSSSSSSSSSRSSSSSSSSAYKISSGFAKVFSVAVAVSLISSII

SEQ ID NO: 1242 - protein, 317 aa, Smittium culicis
MKFLSLAVISAAVSSFVAAQTFNSAAIVEALDEGDIIDDVLPESFTPITTLDVTYENRPMNFGTEYFPYNNETDTFPTVNYNSNANDLYTLALVDPDAPSRANPIRAQVVHFLSINIRGNDIQSGFSGSLTYLPTRPFVGCGRKRFVFVLARQAGVLANSVVPASRPGFNIANFAAQNQLTLIGANYFEAESTPGPQCIIPSASPSASASPASSSSSSGSDSSSSAFTSSSSSITSSLSRSTSASSSTTSSSSRSTSASPASTTPSSGSASVSPATTTSLSGSSSSRSSSSSAYKISSGLAKALSVAVLISLISTII

SEQ ID NO: 1243 - protein, 252 aa, Smittium simulii
MKLTYVTSLISTLALTIVRAEDDQAILSALRSAEIIPNILPVFDPSTDLQVTYVNRAMNFGTEYFPFKNETDNLPTFNYEADSDDFYTLALIDPDAPSRANPFRSQVRHWLSVNIPGKNVAAGNSTGTPYLAPRPFPGCGRKRFVYVLAKQQSNMPNLSVPAARPNFNIADFAKANNMEIIGANYFQVEAQPGATCTIPGAATSTTSTTANGYKTTSTTTTPNVYKTTSTTTTTSDYYGVTEKVVTVSKCRN

SEQ ID NO: 1244 - protein, 328 aa, Smittium simulii
MPPEANMMINSRKKYLNKGTCNKSNSQVLVENLLVNAIRYQHSNPIMCLVIVYREYKSRVETTPYITPHINNSSWMVNRLLRQVNHYEKPLSVDSITRYTHSLSGLITRLKNIPIPKLKSAEIIPNILPVFDPSTDLQVTYVNRAMNFGTEYFPFKNETDNLPTFNYEADSDDFYTLALIDPDAPSRANPFRSQVRHWLSVNIPGKNVAAGNSTGTPYLAPRPFPGCGRKRFVYVLAKQQSNMPNLSVPAARPNFNIADFAKANNMEIIGANYFQVEAQPGATCTIPGAATSTTSTTANGYKTTSATTKKYDNYRTTRKGAKNSKCHH

SEQ ID NO: 1245 - protein, 274 aa, Smittium simulii
MKFTFVTSLISILALTAVKAEDDQAILSALRSGEIIPNILPVFDPSTDFEVTYVNRPMNFGTEYFPFKNETDNLPTFKYEADSDDFYTIALIDPDAPSRANPFRSQVRHWLSVNIPGNNVAAGNSTGTPYLAPRPFPGCGRKRFVYVLAKQESNMPNLSVSAARPNFNIANFAEDNNMEIIGANYFEVEAQPGATCTIPGAQPSSTTPSSSPSSSPSSTPSSSASSTPSSTPSDIKSDTKSNSNSKSSAASGTSNTITLFTTLVSLLFLGVAIN

SEQ ID NO: 1246 - protein, 255 aa, Spathaspora sp. JA1
MLLRRSSTLLRTRIPIASPRISSTARSAILNNYFNRSPVYTHSKMPLVTISQSLDESYTKHKVVPDVIDQFQTQGLLTIEYGPTEQVTLGNELSVSGTQHTPKIQLTLNSPTQDGKIESITETDKFILVLTDPDAPSNSDHKWSEYLHWLVTDLQLTTGSQAKEGEQISHQIEVSQGRELVPYMGPGPPPKTGKHRYVFLLYKQDSSANSLTAPSDRPNWGTGVPSSGVRDWINKNAPASKLLSVNFFYAQNTDN

SEQ ID NO: 1247 - protein, 168 aa, Spizellomyces punctatus DAOM BR117
MLKEVHKALVDSQVIPDVISDFTPTIALDISYKNRKVSLGNEISPSEAEHEPKVSFSPPNPDDLYTLVLADPDAPSREHPAKRCWRHWVVTDITHGDVKKGKVVTSYHPPTPPKGTHLHRYVFILFAQSKSLRHLKLPEDRGGWHVQEFADQYDLKPEGANFFVSQHE

SEQ ID NO: 1248 - protein, 183 aa, Spizellomyces punctatus DAOM BR117
MLAEKAQAKAQAALAKLQKALTSNGVIPDVIPDSLNFKPAYELNIKFPSGKKAALGKELSSAACLSAPAASWPADENAFYTLIMVDPDAPSREKPTQGEIRHWVVANIPGSNIDKGEDLTEFMEPQPETGTGLHRYVFLLYRQKDRMELSVFEGKRTGWNAHQWAKRKGMTLEAVNFFQTQEK

SEQ ID NO: 1249 - protein, 214 aa, Tetrapisispora blattae CBS 6284
MMHALDASQASVEGLAKHDILKDVIKDINFKPWGYITGQFSVNAPISMGNTLDIEETKLRPQLQFVADPKESGIPKINDSDLFTLVMTDPDAPSRTDKKWSEFCHYIEGDIKLLQENQHTTGGVVTDPQFFATSIANGNVLQSYHPPGPPKGTGKHRYVLILYKQPPRTSSSQFTKVTGRPNWGYGTPATGVHKWATENKLEPIAANFFLVQQP

SEQ ID NO: 1250 - protein, 218 aa, Tetrapisispora phaffii CBS 4417
MNQSINAAKTISEALTKHELLQDVIKDSFTPKGFLLVEYPTKKISVTLGNTIAVEDSQEEPHFQFISSSNVAPGSSDGIASFDYNEDSDLFTLVMTDPDAPSRTDKKWSEYCHFVKTDIQLKKSAGSASAGGFTTSHFENKGNVLHSYIGPGPPKGTGLHRYIFLLYKQPHGVKGSSFSSIPDRPNWGTGIPATGAHQWVTANKLELIASNFFLAENV

SEQ ID NO: 1251 - protein, 212 aa, Torulaspora delbrueckii
MNAYSFTQATSEALSQHDILKDVLHDPQFKAWGVLAAEYSKDAPVAMGNTLSVEKTQLKPVIQFTLNPEEKSPKVHDKDLFTLVVTDPDAPSRTDKKWSEYCHYVEADLKVLDHSATSSASHVSEPQFVSAELKNGTVLQQYQGPAPPKGTGKHRYVFVLYKQPDGVTGKQFTTIKDRPNWGFGEPATGVHRWATENKLEPVSVNFFYAETK

SEQ ID NO: 1252 - protein, 255 aa, Trametes cinnabarina
MRIPLLTIATIAVSCVKAQNSTNFTIADAVQAFQVAKIVPDVLPSFNPTAILNVVFFDNTTGTSVNVTPGANLTRELQQTFVLAMVDPDAPTPQNPTAAQIRHLLAPGIQANGSVASGAALVNNTPAISDFLRPTPPAGSDPHRYILLLFVQPVNFTTVAPQFVNSSTPVNNFNISLFAQEVGLGSPVAGNFFLTGPDANSTSSTNGTSSASSAASSSSSPASPTSASSSMGRAELNLIALTVVTSLLGVALSFL

SEQ ID NO: 1253 - protein, 301 aa, Tuber aestivum
MVTPAIGKSFFSFPPSSSSSALRSLLNITRSTTTFRPSTACCATRPVSIPIIHRMPLVRLPHTPSVSSIPLLTAFFLLSLGYYQSIHPRIVSRTISYFVISRSISTNILSHVSLKKHGVIPDVVDDFTPTTMISIAYPNANKEVSLGNTLKPEDAQEKPTIQITPEGTDESQTYTIVLTDPDAPSRDNPEWSEFCHWIVTDVKLPSLETLSSAQTAEAASVNLSDASELVEYAGPTPPEKTGKHRYVFLLYRNEGSKKLEGPSRRRKWGNDDYRKGARQWSDKYGLSLVGANFFFAQNSKQ

SEQ ID NO: 1254 - protein, 299 aa, Tuber borchii
MPTKTSFLAHCDQVGTDWVYDFFRSTVTVPKQITQTRGHPLHSSCTMVTLAIGKSFLSFPPPSSSALRSLLNITRSTTFRPSTACCATRPVSIPIIHRMPLVTINQSLRESLRKHGIIPDVVDDFTPTAMISVAYPNANKEVSLGNTLKPEDTQEKPMIQITPEGTDESQTYTIVLTDPDAPSRDNPEWSEFCHWIVTDVKPPSLEALSSAQTAEAASVDLSDASELVEYMGPAPPEKTKKHRYVFLLYKNEGSKKLEGPSGRKKWGNDDYRKGARQWSDKYGLSLVGANFFFAQNSKQ

SEQ ID NO: 1255 - protein, 258 aa, Tuber magnatum
MVTPAIGKSFFPFPSSSSSSSSALRSLLSITRLTTTTFRPSTACCAIRPVSTPIIHRMPLVTINQSIRESLKKHGVIPDVVDDFTPTTMISIAYPNTNKEVSLGNTLKPEDAQEKPTIQITPEGTDESQTYTIVLTDPDAPSRDSPEWSEFCHWIVTDVKLPSLEALSSAQTAEAASVNLSDASELVEYMGPGPPEKTKKHRYVFLLYRNESSKKLEGPSKRKKWGNDDYRKGARQWSDKYGLSLVGANFFFAQNSKQ

SEQ ID NO: 1256 - protein, 331 aa, Tuber melanosporum Mel28
MPINFLVQSGRVQICGCCPEREKTAETRHRDETTSFLAHCDRVESSVLVKLSGTEGLWFFCSTVTIRKQIAGIRGRPCTTMSPAVGKSFLSFPSSPSTLRSLLSITRLTTFRPSTACCATRLVSTPIIHRMPLVTINQSLRESLKKHGVIPDVVDDFTPTTMLSIAYPNANKEVSLGNTLKPEDTQERPTIQITPEGIDESQTYTIVLTDPDAPSRDNPEWSEFCHWVITDVKLPSLEALSSAQTVEAASVNLSDTSELVEYMGPAPPEKTKKHRYVFLLYRNENSKKLEGPTRRKKWGNDDYRKGARQWADKYGLSLVGANFFFAQNSKQ

SEQ ID NO: 1257 - protein, 185 aa, Uncinocarpus reesii 1704
MAAEIREALRSNGIISDVLDDFQPKFNLKISYPSTEIKLGTRIPTSKAQDTPTYEFHPISPSTGSESNKAYSLVLTDPDAKSREEPIWSEFCHWVIADVSGPGTGGASAGKTLEKYMPPSPPAGTGYHRYVFVLLKGDADKIGQLQAPKERKHWGYGKERHGVRQWASRYDLEVVAANFFFAQHE

SEQ ID NO: 1258 - protein, 215 aa, Vanderwaltozyma polyspora DSM 70294
MNQGINVCKTVVEALSKHDIVQDVIKNISFKPSGFLVIEYGTNLPVTMGNLLPVAQTQAKPKIQFISSPNANENNQDGFKPFSADKSNLFTLVMTDPDAPSRVDHKWSEYCHYVSTDIPLNNESGDNDLNFTTSFINEGNTLIPYMGPGPPKGTGQHRYIFMLFKQPNNVNGSSFTPIKDRPNWGYGTPATGVAKWATENNLELIATNFFFAENV

SEQ ID NO: 1259 - protein, 221 aa, Verticillium alfalfae VaMs.102
MRGISFMTMATLALAHLSLARLANQKVIASDNDDMTEVHEALFQAGIIPNVISEFQPVLGLSASWSKDATASLGNSLDPSALSSPPSVHLEKAGSASNLEADKSYVLTLTDPDAPSRGDPKWGEFCHWIATGLSISASASKLEDVLEYKPPAPPEKTGPHRYILIAFVPANGTTEPLNLSKPGDRKHWGASAPGHGVKDWAHANGLVPIAANFFYAQNKKQ

SEQ ID NO: 1260 - protein, 244 aa, Verticillium nonalfalfae
MRGISFMTMATLALAHLSLARLANQKVIASDNDDMTEVHEAYGLFVPSQPPPFARRRTSLTSPSLFQAGIIPNVISEFQPVLGLSASWSKDATASLGNSLDPSALSSPPSVHLEKAGSASSLEADKSYVLTLTDPDAPSRGDPKWGEFCHWIATGLSISASASRLEDVLEYKPPAPPEKTGPHRYILIAFVPANGTTEPLNLSKPGDRKHWGASAPGHGVKDWAHANGLVPIAANFFYAQNKKQ

SEQ ID NO: 1261 - protein, 217 aa, Wickerhamomyces anomalus NRRL Y-366-8
MSLLTITSSIIDGLKKNEVIPDVINDSFQPKGLLTISYGGSNEVAMGNTLKVDETQTKPKFQFTFNSPSSSDTSAKIQDQIKDTDLFTLVLTDPDAPSRTDKKWSEYAHFITTNILLKNQSNSSADSDFFSTELNLDQQGDEILSYVGPGPPEGTGKHRYVFLLYKQPQGKTDLKPPTDRPNWGLGKPAVGVDEWASENGLELFAVNFFYAENKAKK

SEQ ID NO: 1262 - protein, 213 aa, Wickerhamomyces ciferrii
MPLLTISNSIIESLTKNEILSDVVQDQKFEPKGLLTISYGNSNEVALGNTLGIEDTQTTPKFQFTFNPTNKDSSSTLEEIKDTDLFTLILTDPDAPSRTDKKWSEYAHFIHTNLLLKSQSNASQDSDFFSTELNLDSQGKELLSYQGPAPPQGTGKHRYVFLLYKQPHGVEDLKAPKDRINWGYGEPATGVAKYAKENDLELYAVNFFHAENK

SEQ ID NO: 1263 - protein, 220 aa, Xylona heveae TC161
MSLGTIGQSVRDELKKSSIIDDVIDDFHPSLLLTITYPKSNVSANLGNTIKPSDAQQPPVVELHSSDGSASSHESTYTLVMTDPDAPSREDPKWSEFCHWIITNVPLSNTNGGAGAGAAKSAEAQESAHGLKEIIEYKGPAPPPKTGKHRYVLLAFEHKHHHHNKGNTGGGPSSSSHLSAPSERKQWGTGKVRHGARQWAEKNGLVPVGANFFYAQNNEQ

SEQ ID NO: 1264 - protein, 243 aa, Yarrowia lipolytica
MLARRLGVFSTTLSTSVSRAACGLRKPNSNWDIYRRAVSPKLLSTPTQRMPLITISAALTEGFKKHEVVPDVIDEFDPNTLLEITYGGENVVAVGNTLAVADTQHKPSIHASFPKDTEGTYTLVLTDPDAPSRTDNKWSEYCHYIVTGLKPGVVAEAEGAAVELDLSKGKELIPYMGPGPPPKTGKHRYVFVLYKEGAKSPEAPADRPTWGTNVPGSGTREWAKKNDLTLVTSNFFFAQNTEQ

SEQ ID NO: 1265 - protein, 194 aa, Yarrowia lipolytica CLIB122
MPLITISAALTEGFKKHEVVPDVIDEFDPNTLLEITYGGENVVAVGNTLAVADTQHKPSIHASFPKDTEGTYTLVLTDPDAPSRTDNKWSEYCHYIVTGLKPGVVAEAEGAAVELDLSKGKELIPYMGPGPPPKTGKHRYVFVLYKEGAKSPEAPADRPTWGTNVPGSGTREWAKKNDLTLVTSNFFFAQNTEQ

SEQ ID NO: 1266 - protein, 195 aa, Zygosaccharomyces bailii CLIB 213
MFHSLDAAKASIEGLTKHGIVKDVLKSTSFKPAGVLSAEYPNHQAVAMGNTLPVSGTQEKPTVQFTPMEGYGPFSTSDLLTLVLTDPDAPSRTDKKWSEYCHYIESDIKMGKGGLLEGGKVLQPYVGPGPPKGTGPHRYVFLLYQQPSGVTCSSFTPIQDRPNWGYGSPATGVDKWASENKLKLVGANFFLAENK

SEQ ID NO: 1267 - protein, 195 aa, Zygosaccharomyces bailii ISA1307
MFHSLDAAKASIEGLTKHGIVKDVFKSTSFKPAGVLSAEYPNHQAVAMGNTLSVSGTQDKPTVQFTPMEGYGPFSTSDLLTLVLTDPDAPSRTDKKWSEYCHYIESDIKMGEGGLLGGGKVLQPYVGPGPPKGTGPHRYVFLLYQQPSGVTCSSFTPIKDRPNWGYGSPATGVDKWATENKLKLVGANFFLAENK

SEQ ID NO: 1268 - protein, 195 aa, Zygosaccharomyces parabailii
MFHSLDAAKASIEGLTKHGIVKDVFKSTSFKPAGVLSAEYPNHQAVAMGNTLSVSGTQDKPTVQFTPMEGYGPFSTSDLLTLVLTDPDAPSRTDKKWSEYCHYIESDIKMGEGSLLGGGKVLQPYVGPGPPKGTGPHRYVFLLYQQPSGVTCSSFTPIKDRPNWGYGSPATGVDKWATENKLKLVGANFFLAENK

SEQ ID NO: 1269 - protein, 196 aa, Zygosaccharomyces rouxii
MMMHSFDASKATIEALTQHNIIPDVINPNFVKPLGVLSAEYSKEEPVAMGNQLTIKGTQSKPTVHFAPEEAALKPSDLLTLVITDPDAPSRADKKWSEFCHYVESDIKVSETEGGILENGKVLQSYVGPAPPAGTGPHRYVFLLYKQPGGVTAPQLTEIKGRPNWGYGTPATGVEKWATENKLEPIGVNFFFAESS

SEQ ID NO: 1270 - protein, 195 aa, Zygosaccharomyces rouxii
MLHSFDASKATIEALTKNDIIPDVINPNFVKPLGVLSAEYSKEEPVAMGNQLTIKGTQSRPTVHFAPEEAALKASDLLTLVITDPDAPSRTDKKWSEFCHYVESDIKVSETEGGILEGGKVLQPYVGPGPPAGTGPHRYVFLLYKQPGGVTASELTPIKGRPNWGYGSPATGVEKWATENKLQPIAANFFFAESS

SEQ ID NO: 1271 - DNA, 27 bp, Artificial
  cloning of donor plasmids into DC-DON-SH1 backbone: PEBP1 for XbaI
aaatctagaatgccggtggacctcagc

SEQ ID NO: 1272 - DNA, 33 bp, Artificial
  cloning of donor plasmids into DC-DON-SH1 backbone: PEBP1 rev AscI
agaggcgcgccctacttcccagacagctgctcg

SEQ ID NO: 1273 - DNA, 28 bp, Artificial
  cloning of donor plasmids into DC-DON-SH1 backbone: PEBP4 for XbaI
aaatctagaatgggttggacaatgaggc

SEQ ID NO: 1274 - DNA, 31 bp, Artificial
  cloning of donor plasmids into DC-DON-SH1 backbone: PEBP4 rev AscI
agaggcgcgccctagcaggcagctatctccg

SEQ ID NO: 1275 - DNA, 31 bp, Artificial
  cloning of donor plasmids into DC-DON-SH1 backbone: NtFT2 for XbaI
aaatctagaatgttaagagcaaatcctttag

SEQ ID NO: 1276 - DNA, 29 bp, Artificial
  cloning of donor plasmids into DC-DON-SH1 backbone: NtFT2 rev AscI
agaggcgcgccttataggtgacggccacc

SEQ ID NO: 1277 - DNA, 30 bp, Artificial
  cloning of donor plasmids into DC-DON-SH1 backbone: NtFT4 for XbaI
aaatctagaatgccaagaatagatcctttg

SEQ ID NO: 1278 - DNA, 27 bp, Artificial
  cloning of donor plasmids into DC-DON-SH1 backbone: NtFT4 rev AscI
agaggcgcgccttaatatgcgcggcgg

SEQ ID NO: 1279 - DNA, 29 bp, Artificial
  cloning of donor plasmids into DC-DON-SH1 backbone: CG18594 for XbaI
aaatctagaatggacaccgccggcattat

SEQ ID NO: 1280 - DNA, 33 bp, Artificial
  cloning of donor plasmids into DC-DON-SH1 backbone: CG18594 rev AscI
agaggcgcgccttactggaccgtctcgatgagg

SEQ ID NO: 1281 - DNA, 27 bp, Artificial
  cloning of donor plasmids into DC-DON-SH1 backbone: CG10298 for XbaI
aaatctagaatgtccgattccaccgtg

SEQ ID NO: 1282 - DNA, 33 bp, Artificial
  cloning of donor plasmids into DC-DON-SH1 backbone: CG10298 rev AscI
agaggcgcgccctacttcttgccagatagttgc

SEQ ID NO: 1283 - DNA, 54 bp, Artificial
  cloning of pcDNA3-HA-EGFP: HA-EGFP for SpeI
aaaactagtatgtacccctacgatgtccctgactacgctatggtgagcaagggc

SEQ ID NO: 1284 - DNA, 32 bp, Artificial
  cloning of pcDNA3-HA-EGFP: EGFP rev XbaI
aaaatctagattacttgtacagctcgtccatg

SEQ ID NO: 1285 - DNA, 29 bp, Artificial
  cloning of pcDNA3 constructs: EGFP- rev XhoI
aaaatctagacttgtacagctcgtccatg

SEQ ID NO: 1286 - DNA, 57 bp, Artificial
  cloning of pcDNA3 constructs: myc-mRFP for KpnI
aaaggtaccatggagcaaaaacttatatccgaggaggatcttatggcctcctccgag

SEQ ID NO: 1287 - DNA, 21 bp, Artificial
  cloning of pcDNA3 constructs: mRFP- rev XhoI
acactcgagggcgccggtgga

SEQ ID NO: 1288 - DNA, 30 bp, Artificial
  cloning of pcDNA3 constructs: NtFT4 for XhoI
aaactcgagatgccaagaatagatcctttg

SEQ ID NO: 1289 - DNA, 25 bp, Artificial
  cloning of pcDNA3 constructs: NtFT4 rev ApaI
aaagggcccttaatatgcgcggcgg

SEQ ID NO: 1290 - DNA, 29 bp, Artificial
  cloning of pcDNA3 constructs: CG18594 for XhoI
agactcgagatggacaccgccggcattat

SEQ ID NO: 1291 - DNA, 31 bp, Artificial
  cloning of pcDNA3 constructs: CG18594 rev XbaI
agatctagattactggaccgtctcgatgagg

SEQ ID NO: 1292 - DNA, 25 bp, Artificial
  cloning of pcDNA3 constructs: H2AZ for XhoI
acactcgagatggctggcggtaagg

SEQ ID NO: 1293 - DNA, 30 bp, Artificial
  cloning of pcDNA3 constructs: H2AZ rev XbaI
acatctagaccaggcatcctttagacagtc

SEQ ID NO: 1294 - DNA, 96 bp, Artificial
  cloning of pcDNA3 constructs: LifeAct-mRFP for KpnI
acaggtaccatgggcgtggccgacctgatcaagaagttcgagagcatcagcaaggaagagggcgacccaccggtcgccaccatggcctcctccgag

SEQ ID NO: 1295 - DNA, 24 bp, Artificial
  cloning of pcDNA3 constructs: mRFP rev XbaI
aaatctagattaggcgccggtgga

SEQ ID NO: 1296 - DNA, 23 bp, Artificial
  sequencing: DC-DON-SH1 seq for
cggtgggaggtctatataagcag

SEQ ID NO: 1297 - DNA, 21 bp, Artificial
  sequencing: DC-DON-SH1 seq rev
gacagtgggagtggcaccttc

SEQ ID NO: 1298 - DNA, 21 bp, Artificial
  sequencing: CMV for
cgcaaatgggcggtaggcgtg

SEQ ID NO: 1299 - DNA, 23 bp, Artificial
  sequencing: T7 for
taatacgactcactatagggaga

SEQ ID NO: 1300 - DNA, 18 bp, Artificial
  sequencing: bGH rev
tagaaggcacagtcgagg

SEQ ID NO: 1301 - DNA, 20 bp, Artificial
  verification of genomic integration into the aavs1 safe harbor locus: 5prime Junction PCR Primer for
ccggaactctgccctctaac

SEQ ID NO: 1302 - DNA, 20 bp, Artificial
  verification of genomic integration into the aavs1 safe harbor locus: 5prime Junction PCR Primer rev
cccgtgagtcaaaccgctat

SEQ ID NO: 1303 - DNA, 20 bp, Artificial
  verification of genomic integration into the aavs1 safe harbor locus: 3prime Junction PCR Primer for
agctatctggtctcccttcc

SEQ ID NO: 1304 - DNA, 20 bp, Artificial
  verification of genomic integration into the aavs1 safe harbor locus: 3prime Junction PCR Primer rev
tcctgggataccccgaagag

SEQ ID NO: 1305 - DNA, 19 bp, Artificial
  transgene expression - reference gene: GFP for
atcgagaagtacgaggacg

SEQ ID NO: 1306 - DNA, 20 bp, Artificial
  transgene expression - reference gene: GPF rev
caccacgaagctgtagtagc

SEQ ID NO: 1307 - DNA, 20 bp, Artificial
  transgene expression - PEBP expression: PEBP1 for
agacccaccagcatttcgtg

SEQ ID NO: 1308 - DNA, 20 bp, Artificial
  transgene expression - PEBP expression: PEBP1 back
ggtggtctccagatcggttg

SEQ ID NO: 1309 - DNA, 20 bp, Artificial
  transgene expression - PEBP expression: PEBP4 for
tcctggatggagccgatagt

SEQ ID NO: 1310 - DNA, 20 bp, Artificial
  transgene expression - PEBP expression: PEBP4 rev
aactggtagcgatggaagcc

SEQ ID NO: 1311 - DNA, 27 bp, Artificial
  transgene expression - PEBP expression: NtFT2 for
agatatccctgcaaccacagaagcaac

SEQ ID NO: 1312 - DNA, 27 bp, Artificial
  transgene expression - PEBP expression: NtFT2 rev
aaacagcggcaacaggcaaattgagac

SEQ ID NO: 1313 - DNA, 26 bp, Artificial
  transgene expression - PEBP expression: NtFT4 for
gatatcccagcaactacagatacaag

SEQ ID NO: 1314 - DNA, 26 bp, Artificial
  transgene expression - PEBP expression: NtFT4 rev
gaaacgggcaaaccaagattgtaaac

SEQ ID NO: 1315 - DNA, 20 bp, Artificial
  transgene expression - PEBP expression: CG18594 for
ccaccatcacctatccttcc

SEQ ID NO: 1316 - DNA, 20 bp, Artificial
  transgene expression - PEBP expression: CG18594 rev
gaacttctcggtggtgatct

SEQ ID NO: 1317 - DNA, 18 bp, Artificial
  transgene expression - PEBP expression: CG10298 for
agccagccaaaggtgaaa

SEQ ID NO: 1318 - DNA, 19 bp, Artificial
  transgene expression - PEBP expression: CG10298 rev
ggacctgcacccacatatt

SEQ ID NO: 1319 - DNA, 20 bp, Artificial
  gene expression - reference gene: GAPDH for
ctctgctcctcctgttcgac

SEQ ID NO: 1320 - DNA, 20 bp, Artificial
  gene expression - reference gene: GAPDH rev
ttcccgttctcagccttgac

SEQ ID NO: 1321 - DNA, 19 bp, Artificial
  gene expression - reference gene: beta-ACTIN for
cacagagcctcgcctttgc

SEQ ID NO: 1322 - DNA, 20 bp, Artificial
  gene expression - reference gene: beta-ACTIN rev
aatccttctgacccatgccc

SEQ ID NO: 1323 - DNA, 19 bp, Artificial
  gene expression - reference gene: RpL32 for
ggttacgacccatcagccc

SEQ ID NO: 1324 - DNA, 20 bp, Artificial
  gene expression - reference gene: RpL32 rev
tcaatgcctctgggtttccg

SEQ ID NO: 1325 - DNA, 20 bp, Artificial
  gene expression - reference gene: GUSB for
gctccgaatcactatcgcca

SEQ ID NO: 1326 - DNA, 21 bp, Artificial
  gene expression - reference gene: GUSB rev
cgcacttccaacttgaacagg

SEQ ID NO: 1327 - DNA, 20 bp, Artificial
  gene expression - epithelial markers: CDH1 for
ttctgctgatcctgtctgat

SEQ ID NO: 1328 - DNA, 20 bp, Artificial
  gene expression - epithelial markers: CDH1 rev
aggtggtcacttggtcttta

SEQ ID NO: 1329 - DNA, 20 bp, Artificial
  gene expression - epithelial markers: CTNNB1 for
aaggagctaaaatggcagtg

SEQ ID NO: 1330 - DNA, 20 bp, Artificial
  gene expression - epithelial markers: CTNNB1 rev
tcctaaagcttgcattccac

SEQ ID NO: 1331 - DNA, 20 bp, Artificial
  gene expression - epithelial markers: KRT18 for
tgacaccaatatcacacgac

SEQ ID NO: 1332 - DNA, 20 bp, Artificial
  gene expression - epithelial markers: KRT18 rev
tcaatctgctgagaccagta

SEQ ID NO: 1333 - DNA, 20 bp, Artificial
  gene expression - epithelial markers: KRT19 for
cactactacacgaccatcca

SEQ ID NO: 1334 - DNA, 20 bp, Artificial
  gene expression - epithelial markers: KRT19 rev
ctcagcgtactgatttcctc

SEQ ID NO: 1335 - DNA, 16 bp, Artificial
  gene expression - mesenchymal markers: CDH2 for
atgtgccggatagcgg

SEQ ID NO: 1336 - DNA, 20 bp, Artificial
  gene expression - mesenchymal markers: CDH2 rev
ggctcactgctctcatattg

SEQ ID NO: 1337 - DNA, 21 bp, Artificial
  gene expression - mesenchymal markers: SNAI 1 rev
cttgacatctgagtgggtctg

SEQ ID NO: 1338 - DNA, 19 bp, Artificial
  gene expression - mesenchymal markers: SNAI 1 for
ctcgaaaggccttcaactg

SEQ ID NO: 1339 - DNA, 19 bp, Artificial
  gene expression - mesenchymal markers: SNAI 2 for
attcggacccacacattac

SEQ ID NO: 1340 - DNA, 18 bp, Artificial
  gene expression - mesenchymal markers: SNAI 2 rev
cagaatgggtctgcagat

SEQ ID NO: 1341 - DNA, 20 bp, Artificial
  gene expression - mesenchymal markers: VIM for
aggaggagatgcttcagaga

SEQ ID NO: 1342 - DNA, 20 bp, Artificial
  gene expression - mesenchymal markers: VIM rev
agctcctggatttcctcttc

SEQ ID NO: 1343 - DNA, 20 bp, Artificial
  gene expression - cell survival: AKT 1 for
gaccatgaacgagtttgagt

SEQ ID NO: 1344 - DNA, 20 bp, Artificial
  gene expression - cell survival: AKT 1 rev
cgtactccatgacaaagcag

SEQ ID NO: 1345 - DNA, 19 bp, Artificial
  gene expression - cell survival: BCL2 for
gaactgggggaggattgtg

SEQ ID NO: 1346 - DNA, 19 bp, Artificial
  gene expression - cell survival: BCL2 rev
agaaatcaaacagaggccg

SEQ ID NO: 1347 - DNA, 20 bp, Artificial
  gene expression - cell survival: BIRC 5 for
cgaccccatagaggaacata

SEQ ID NO: 1348 - DNA, 20 bp, Artificial
  gene expression - cell survival: BIRC 5 rev
ctaagacattgctaaggggc

SEQ ID NO: 1349 - DNA, 20 bp, Artificial
  gene expression - cell survival: JUN for
actgcaaagatggaaacgac

SEQ ID NO: 1350 - DNA, 19 bp, Artificial
  gene expression - cell survival: JUN rev
tgctcatctgtcacgttct

SEQ ID NO: 1351 - DNA, 20 bp, Artificial
  gene expression - cell survival: MAPK8 for
gagctcatggatgcaaatct

SEQ ID NO: 1352 - DNA, 20 bp, Artificial
  gene expression - cell survival: MAPK8 rev
aggcgtcatcataaaactcg

SEQ ID NO: 1353 - DNA, 20 bp, Artificial
  gene expression - cell survival: MYC for
gagacagatcagcaacaacc

SEQ ID NO: 1354 - DNA, 20 bp, Artificial
  gene expression - cell survival: MYC rev
tttcaactgttctcgtcgtt

SEQ ID NO: 1355 - DNA, 20 bp, Artificial
  gene expression - proliferation: BRCA1 for
ccagaacaaagcacatcaga

SEQ ID NO: 1356 - DNA, 20 bp, Artificial
  gene expression - proliferation: BRCA1 rev
atgtttccgtcaaatcgtgt

SEQ ID NO: 1357 - DNA, 20 bp, Artificial
  gene expression - proliferation: BRCA2 for
tacatgaacaaatgggcagg

SEQ ID NO: 1358 - DNA, 20 bp, Artificial
  gene expression - proliferation: BRCA2 rev
atttctgccttttggctagg

SEQ ID NO: 1359 - DNA, 20 bp, Artificial
  gene expression - proliferation: CCND1 for
tcggtgtcctacttcaaatg

SEQ ID NO: 1360 - DNA, 20 bp, Artificial
  gene expression - proliferation: CCND1 rev
atggagttgtcggtgtagat

SEQ ID NO: 1361 - DNA, 21 bp, Artificial
  gene expression - proliferation: CDKN1A for
cactgtcttgtacccttgtgc

SEQ ID NO: 1362 - DNA, 20 bp, Artificial
  gene expression - proliferation: CDKN1A rev
aaaatgcccagcactcttag

SEQ ID NO: 1363 - DNA, 17 bp, Artificial
  gene expression - proliferation: CDKN2A for
gagggcttcctggacac

SEQ ID NO: 1364 - DNA, 19 bp, Artificial
  gene expression - proliferation: CDKN2A rev
tcaatcggggatgtctgag

SEQ ID NO: 1365 - DNA, 20 bp, Artificial
  gene expression - proliferation: ID1 for
gaatcatgaaagtcgccagt

SEQ ID NO: 1366 - DNA, 20 bp, Artificial
  gene expression - proliferation: ID1 rev
tgaaggtccctgatgtagtc

SEQ ID NO: 1367 - DNA, 24 bp, Artificial
  gene expression - proliferation: PTEN for
caagatatacaatctttgtgctga

SEQ ID NO: 1368 - DNA, 20 bp, Artificial
  gene expression - proliferation: PTEN rev
tggtccttacttccccatag

SEQ ID NO: 1369 - protein, 8 aa, Nicotiana tabacum
NAPDIIDS

SEQ ID NO: 1370 - protein, 5 aa, Nicotiana tabacum
YAPGW
